(19) United States
(12) Patent Application Publication
(10) Pub. No.: US 2025/0333520 A1
(43) Pub. Date: Oct. 30, 2025

(54) COMPOSITIONS AND METHODS RELATED TO IL2 RECEPTOR BINDING

(71) Applicant: Synthekine, Inc., Menlo Park, CA (US)

(72) Inventors: Robert Kastelein, Menlo Park, CA (US); Rene De Waal Malefyt, Menlo Park, CA (US); Deepti Rokkam, Menlo Park, CA (US); Patrick Lupardus, Menlo Park, CA (US); Sandro Vivona, Menlo Park, CA (US)

(21) Appl. No.: 18/260,709

(22) PCT Filed: Jan. 11, 2022
(86) PCT No.: PCT/US2022/012055

§ 371 Date: Jul. 7, 2023

Related U.S. Application Data
(63) Continuation-in-part of application No. PCT/US21/44853, filed on Aug. 5, 2021.
(60) Provisional application No. 63/135,884, filed on Jan. 11, 2021.
(60) Provisional application No. 63/136,095, filed on Jan. 11, 2021.

(51) Int. Cl. C07K 16/28; A61K 39/00

(52) U.S. Cl. CPC C07K 16/2866; A61K 2039/505; C07K 2317/40; C07K 2317/569; C07K 2317/92

(57) ABSTRACT

Provided herein am IL2R binding proteins that bind to IL2Rβ and IL2Rγ and comprise an anti-IL2Rβ VHH antibody and an anti-IL2Rγ VHH antibody.

### CROSS-REFERENCE TO RELATED PATENT APPLICATIONS

[0001] The present patent application is a 371 national stage application of PCT/US2022/012055, filed Jan. 11, 2022, which claims priority to U.S. Provisional Application No. 63/136,095, filed Jan. 11, 2021, U.S. Provisional Application No. 63/135,884, filed Jan. 11, 2021, and PCT Application No. PCT/US2021/044853, filed Aug. 5, 2021, the disclosure of each of which is hereby incorporated by reference in its entirety for all purposes.

### SEQUENCE LISTING

[0002] The instant application contains a Sequence Listing which has been submitted electronically in ASCII format and is hereby incorporated by reference in its entirety. Said ASCII copy, created on Feb. 25, 2022, is named 106249-1293186-007300PC_SL.txt and is 900,711 bytes in size.

### BACKGROUND OF THE DISCLOSURE

[0003] Interleukin 2 (IL2) is a pluripotent cytokine produced primarily by activated CD4 T cells that is involved in producing a normal immune response. IL2 exerts a wide spectrum of effects on the immune system and plays important roles in regulating both immune activation, suppression and homeostasis. IL2 promotes proliferation and expansion of activated T lymphocytes, potentiates B cell growth, and activates monocytes and natural killer cells. The amino acid sequence of human IL2 is found in Genbank under accession locator NP 000577.2.

[0004] As an immune system stimulator, IL2 has found use in the treatment of cancer and chronic viral infections. However, the effects of IL2 have also been associated with mediation of autoimmunity and transplant rejection. IL2 therapy, especially at high doses, has been associated with significant toxicity in human subjects. Consequently, a therapeutic goal is to maintain desired actions of IL2 while minimizing associated autoimmune or immunosuppressive responses. Because of its roles in immune regulation and disease, the search for new IL2 analogs and variants remains an active area of research.

[0005] IL2 exerts its effect on mammalian immune cells through interaction with three different cell surface proteins: (1) CD25 (also referred to as the IL2 receptor alpha, IL2Rα, or p55), CD122 (also referred to as the IL2 receptor beta, IL2Rβ, IL15Rβ, or p70-75), and CD132 (also referred to as the IL2 receptor gamma, IL2Rγ, or common gamma chain as it is a component of other multimeric receptors in this family).

[0006] CD25 is a 55 kD polypeptide that is constituitively expressed in Treg cells and inducibly expressed on other T cells in response to activation (e.g., by CD3). hIL2 binds to hCD25 with a Kd of approximately 10⁻⁸ M. CD25 is also referred to in the literature as the “low affinity” IL2 receptor. The human CD25 is expressed as a 272 amino acid pre-protein comprising a 21 amino acid signal sequence which is post-translationally removed to render a 251 amino acid mature protein. Amino acids 22-240 (amino acids 1-219 of the mature protein) correspond to the extracellular domain. Amino acids 241-259 (amino acids 220-238 of the mature protein) correspond to transmembrane domain. Amino acids 260-272 (amino acids 239-251 of the mature protein) correspond to intracellular domain. The intracellular domain of CD25 is comparatively small (13 amino acids) and has not been associated with any independent signaling activity. The IL2/CD25 complex has not been observed to produce a detectable intracellular signaling response. Human CD25 nucleic acid and protein sequences may be found as Genbank accession numbers NM_000417 and NP_0004Q8 respectively.

[0007] CD122 is a single pass type I transmembrane protein. The human CD122 (hCD122) is expressed as a 551 amino acid protein, the first 26 amino acids comprising a signal sequence which is post-translationally cleaved in the mature 525 amino acid protein. Amino acids 27 240 (amino acids 1-214 of the mature protein) correspond to the extracellular domain, amino acids 241-265 (amino acids 225-239 of the mature protein) correspond to the transmembrane domain and amino acids 266-551 (amino acids 240-525 of the mature protein) correspond to the intracellular domain. As used herein, the term CD122 includes naturally occurring variants of the CD122 protein including the S57F and D365E (as numbered in accordance with the mature hCD122 protein). hCD122 is referenced at UniProtKB database as entry P14784. Human CD122 nucleic acid and protein sequences may be found as Genbank accession numbers NM 000878 and NP_000869 respectively.

[0008] CD132 is a type 1 cytokine receptor and is shared by the receptor complexes for IL4, IL7, IL9, IL15, and IL21, hence the reference to the “common” gamma chain. Human CD132 (hCD132) is expressed as a 369 amino acid pre-protein comprising a 22 amino acid N-terminal signal sequence. Amino acids 23-262 (amino acids 1-240 of the mature protein) correspond to the extracellular domain, amino acids 263-283 (amino acids 241-262 of the mature protein) correspond to the 21 amino acid transmembrane domain, and amino acids 284-369 (amino acids 262-347 of the mature protein) correspond to the intracellular domain. hCD132 is referenced at UniProtKB database as entry P31785. Human CD132 nucleic acid and protein sequences may be found as Genbank accession numbers: NM 000206 and NP_000197 respectively.

[0009] The IL2 receptor proteins combine to produce two additional IL2 receptor complexes: (a) an “intermediate affinity” IL2 receptor comprising CD122 and CD132 (also referred to as IL2Rβγ) and (b) a “high affinity” IL2 receptor complex comprising the CD25, CD122, and CD132 proteins (also referred to as IL2Rαβγ). hIL2 possesses a Kd of approximately 10⁻⁹ M with respect to the intermediate affinity CD122/CD132 (IL2βγ) receptor complex. The intermediate affinity CD122/CD132 (IL2βγ) receptor complex is predominantly expressed on resting T-cells and NK cells. hIL2 possesses a Kd of approximately 10⁻¹¹ M with respect to the high IL2 affinity receptor complex. Most cells, such as resting T cells, demonstrate low responsiveness to IL2 since they only express the CD122 and CD132 which have comparatively low affinity for IL2 relative to the CD25/CD122/CD132 high affinity receptor complex. The high affinity receptor complex is predominantly identified on activated lymphocytes which inducibly express CD25 and Treg cells that express CD25 constituitively.

### SUMMARY OF THE DISCLOSURE

[0010] In one aspect, provided herein is an IL2 receptor (IL2R) binding protein that specifically binds to IL2Rβ and IL2Rγ, comprising an anti-IL2Rβ VHH antibody and an anti-IL2Rγ VHH antibody. In some embodiments, the IL2R binding molecule comprises a single-domain antibody (sdAb) that specifically binds to IL2Rβ (an IL2Rb sdAb) and a sdAb that specifically binds to IL2Rγ (an anti-IL2Rγ sdAb).

[0011] In some embodiments, the anti-IL2Rβ VHH antibody comprises a complementarity determining region 1 (CDR1) comprising an amino acid sequence of SEQ ID NO: 1 or SEQ ID NO: 410, a CDR2 comprising an amino acid sequence of SEQ ID NO: 2, and CDR3 a comprising an amino acid sequence of SEQ ID NO: 3; and the anti-IL2Rγ VHH antibody comprises:
[0012] i) a CDR1 comprising an amino acid sequence of SEQ ID NO: 41 or SEQ ID NO: 420, a CDR2 comprising an amino acid sequence of SEQ ID NO: 42, and CDR3 a comprising an amino acid sequence of SEQ ID NO: 43;
[0013] ii) a CDR1 comprising an amino acid sequence of SEQ ID NO: 45 or SEQ ID NO: 421, a CDR2 comprising an amino acid sequence of SEQ ID NO: 46, and CDR3 a comprising an amino acid sequence of SEQ ID NO: 47;
[0014] iii) a CDR1 comprising an amino acid sequence of SEQ ID NO: 49 or SEQ ID NO: 422, a CDR2 comprising an amino acid sequence of SEQ ID NO: 50, and CDR3 a comprising an amino acid sequence of SEQ ID NO: 51;
[0015] iv) a CDR1 comprising an amino acid sequence of SEQ ID NO: 53 or SEQ ID NO: 423, a CDR2 comprising an amino acid sequence of SEQ ID NO: 54, and CDR3 a comprising an amino acid sequence of SEQ ID NO: 55;
[0016] v) a CDR1 comprising an amino acid sequence of SEQ ID NO: 57 or SEQ ID NO: 424, a CDR2 comprising an amino acid sequence of SEQ ID NO: 58, and CDR3 a comprising an amino acid sequence of SEQ ID NO: 59;
[0017] vi) a CDR1 comprising an amino acid sequence of SEQ ID NO: 61 or SEQ ID NO: 425, a CDR2 comprising an amino acid sequence of SEQ ID NO: 62, and CDR3 a comprising an amino acid sequence of SEQ ID NO: 63;
[0018] wherein each CDR independently comprises 0, 1, 2, or 3 amino acid changes relative to the sequence.

[0019] In some embodiments, the anti-IL2Rβ VHH antibody comprises a complementarity determining region 1 (CDR1) comprising an amino acid sequence of SEQ ID NO: 5 or SEQ ID NO: 411, a CDR2 comprising an amino acid sequence of SEQ ID NO: 6, and CDR3 a comprising an amino acid sequence of SEQ ID NO: 7; and the anti-IL2Rγ VHH antibody comprises:
[0020] i) a CDR1 comprising an amino acid sequence of SEQ ID NO: 41 or SEQ ID NO: 420, a CDR2 comprising an amino acid sequence of SEQ ID NO: 42, and CDR3 a comprising an amino acid sequence of SEQ ID NO: 43;
[0021] ii) a CDR1 comprising an amino acid sequence of SEQ ID NO: 45 or SEQ ID NO: 421, a CDR2 comprising an amino acid sequence of SEQ ID NO: 46, and CDR3 a comprising an amino acid sequence of SEQ ID NO: 47;
[0022] iii) a CDR1 comprising an amino acid sequence of SEQ ID NO: 49 or SEQ ID NO: 422, a CDR2 comprising an amino acid sequence of SEQ ID NO: 50, and CDR3 a comprising an amino acid sequence of SEQ ID NO: 51;
[0023] iv) a CDR1 comprising an amino acid sequence of SEQ ID NO: 53 or SEQ ID NO: 423, a CDR2 comprising an amino acid sequence of SEQ ID NO: 54, and CDR3 a comprising an amino acid sequence of SEQ ID NO: 55;
[0024] v) a CDR1 comprising an amino acid sequence of SEQ ID NO: 57 or SEQ ID NO: 424, a CDR2 comprising an amino acid sequence of SEQ ID NO: 58, and CDR3 a comprising an amino acid sequence of SEQ ID NO: 59;
[0025] vi) a CDR1 comprising an amino acid sequence of SEQ ID NO: 61 or SEQ ID NO: 425, a CDR2 comprising an amino acid sequence of SEQ ID NO: 62, and CDR3 a comprising an amino acid sequence of SEQ ID NO: 63;
   wherein each CDR independently comprises 0, 1, 2, or 3 amino acid changes relative to the sequence.

[0026] In some embodiments, the anti-IL2Rβ VHH antibody comprises a complementarity determining region 1 (CDR1) comprising an amino acid sequence of SEQ ID NO: 9 or SEQ ID NO: 412, a CDR2 comprising an amino acid sequence of SEQ ID NO: 10, and CDR3 a comprising an amino acid sequence of SEQ ID NO: 11; and the anti-IL2Rγ VHH antibody comprises:
[0027] i) a CDR1 comprising an amino acid sequence of SEQ ID NO: 41 or SEQ ID NO: 420, a CDR2 comprising an amino acid sequence of SEQ ID NO: 42, and CDR3 a comprising an amino acid sequence of SEQ ID NO: 43;
[0028] ii) a CDR1 comprising an amino acid sequence of SEQ ID NO: 45 or SEQ ID NO: 421, a CDR2 comprising an amino acid sequence of SEQ ID NO: 46, and CDR3 a comprising an amino acid sequence of SEQ ID NO: 47;
[0029] iii) a CDR1 comprising an amino acid sequence of SEQ ID NO: 49 or SEQ ID NO: 422, a CDR2 comprising an amino acid sequence of SEQ ID NO: 50, and CDR3 a comprising an amino acid sequence of SEQ ID NO: 51;
[0030] iv) a CDR1 comprising an amino acid sequence of SEQ ID NO: 53 or SEQ ID NO: 423, a CDR2 comprising an amino acid sequence of SEQ ID NO: 54, and CDR3 a comprising an amino acid sequence of SEQ ID NO: 55;
[0031] v) a CDR1 comprising an amino acid sequence of SEQ ID NO: 57 or SEQ ID NO: 424, a CDR2 comprising an amino acid sequence of SEQ ID NO: 58, and CDR3 a comprising an amino acid sequence of SEQ ID NO: 59;
[0032] vi) a CDR1 comprising an amino acid sequence of SEQ ID NO: 61 or SEQ ID NO: 425, a CDR2 comprising an amino acid sequence of SEQ ID NO: 62, and CDR3 a comprising an amino acid sequence of SEQ ID NO: 63;
   wherein each CDR independently comprises 0, 1, 2, or 3 amino acid changes relative to the sequence.

[0033] In some embodiments, the anti-IL2Rβ VHH antibody comprises a complementarity determining region 1 (CDR1) comprising an amino acid sequence of SEQ ID NO: 13 or SEQ ID NO: 413, a CDR2 comprising an amino acid sequence of SEQ ID NO: 14, and CDR3 a comprising an amino acid sequence of SEQ ID NO: 15; and the anti-IL2Rγ VHH antibody comprises:
[0034] i) a CDR1 comprising an amino acid sequence of SEQ ID NO: 41 or SEQ ID NO: 420, a CDR2 comprising an amino acid sequence of SEQ ID NO: 42, and CDR3 a comprising an amino acid sequence of SEQ ID NO: 43;
[0035] ii) a CDR1 comprising an amino acid sequence of SEQ ID NO: 45 or SEQ ID NO: 421, a CDR2 comprising an amino acid sequence of SEQ ID NO: 46, and CDR3 a comprising an amino acid sequence of SEQ ID NO: 47;
[0036] iii) a CDR1 comprising an amino acid sequence of SEQ ID NO: 49 or SEQ ID NO: 422, a CDR2 comprising an amino acid sequence of SEQ ID NO: 50, and CDR3 a comprising an amino acid sequence of SEQ ID NO: 51;
[0037] iv) a CDR1 comprising an amino acid sequence of SEQ ID NO: 53 or SEQ ID NO: 423, a CDR2 comprising an amino acid sequence of SEQ ID NO: 54, and CDR3 a comprising an amino acid sequence of SEQ ID NO: 55;
[0038] v) a CDR1 comprising an amino acid sequence of SEQ ID NO: 57 or SEQ ID NO: 424, a CDR2 comprising an amino acid sequence of SEQ ID NO: 58, and CDR3 a comprising an amino acid sequence of SEQ ID NO: 59;
[0039] vi) a CDR1 comprising an amino acid sequence of SEQ ID NO: 61 or SEQ ID NO: 425, a CDR2 comprising an amino acid sequence of SEQ ID NO: 62, and CDR3 a comprising an amino acid sequence of SEQ ID NO: 63;
   wherein each CDR independently comprises 0, 1, 2, or 3 amino acid changes relative to the sequence.

[0040] In some embodiments, the anti-IL2Rβ VHH antibody comprises a complementarity determining region 1 (CDR1) comprising an amino acid sequence of SEQ ID NO: 17 or SEQ ID NO: 414, a CDR2 comprising an amino acid sequence of SEQ ID NO: 18, and CDR3 a comprising an amino acid sequence of SEQ ID NO: 19; and the anti-IL2Rγ VHH antibody comprises:
[0041] i) a CDR1 comprising an amino acid sequence of SEQ ID NO: 41 or SEQ ID NO: 420, a CDR2 comprising an amino acid sequence of SEQ ID NO: 42, and CDR3 a comprising an amino acid sequence of SEQ ID NO: 43;
[0042] ii) a CDR1 comprising an amino acid sequence of SEQ ID NO: 45 or SEQ ID NO: 421, a CDR2 comprising an amino acid sequence of SEQ ID NO: 46, and CDR3 a comprising an amino acid sequence of SEQ ID NO: 47;
[0043] iii) a CDR1 comprising an amino acid sequence of SEQ ID NO: 49 or SEQ ID NO: 422, a CDR2 comprising an amino acid sequence of SEQ ID NO: 50, and CDR3 a comprising an amino acid sequence of SEQ ID NO: 51;
[0044] iv) a CDR1 comprising an amino acid sequence of SEQ ID NO: 53 or SEQ ID NO: 423, a CDR2 comprising an amino acid sequence of SEQ ID NO: 54, and CDR3 a comprising an amino acid sequence of SEQ ID NO: 55;
[0045] v) a CDR1 comprising an amino acid sequence of SEQ ID NO: 57 or SEQ ID NO: 424, a CDR2 comprising an amino acid sequence of SEQ ID NO: 58, and CDR3 a comprising an amino acid sequence of SEQ ID NO: 59;
[0046] vi) a CDR1 comprising an amino acid sequence of SEQ ID NO: 61 or SEQ ID NO: 425, a CDR2 comprising an amino acid sequence of SEQ ID NO: 62, and CDR3 a comprising an amino acid sequence of SEQ ID NO: 63;
   wherein each CDR independently comprises 0, 1, 2, or 3 amino acid changes relative to the sequence.

[0047] In some embodiments, the anti-IL2Rβ VHH antibody comprises a complementarity determining region 1 (CDR1) comprising an amino acid sequence of SEQ ID NO: 21 or SEQ ID NO: 415, a CDR2 comprising an amino acid sequence of SEQ ID NO: 122, and CDR3 a comprising an amino acid sequence of SEQ ID NO: 23; and the anti-IL2Rγ VHH antibody comprises:
[0048] i) a CDR1 comprising an amino acid sequence of SEQ ID NO: 41 or SEQ ID NO: 420, a CDR2 comprising an amino acid sequence of SEQ ID NO: 42, and CDR3 a comprising an amino acid sequence of SEQ ID NO: 43;
[0049] ii) a CDR1 comprising an amino acid sequence of SEQ ID NO: 45 or SEQ ID NO: 421, a CDR2 comprising an amino acid sequence of SEQ ID NO: 46, and CDR3 a comprising an amino acid sequence of SEQ ID NO: 47;
[0050] iii) a CDR1 comprising an amino acid sequence of SEQ ID NO: 49 or SEQ ID NO: 422, a CDR2 comprising an amino acid sequence of SEQ ID NO: 50, and CDR3 a comprising an amino acid sequence of SEQ ID NO: 51;
[0051] iv) a CDR1 comprising an amino acid sequence of SEQ ID NO: 53 or SEQ ID NO: 423, a CDR2 comprising an amino acid sequence of SEQ ID NO: 54, and CDR3 a comprising an amino acid sequence of SEQ ID NO: 55;
[0052] v) a CDR1 comprising an amino acid sequence of SEQ ID NO: 57 or SEQ ID NO: 424, a CDR2 comprising an amino acid sequence of SEQ ID NO: 58, and CDR3 a comprising an amino acid sequence of SEQ ID NO: 59;
[0053] vi) a CDR1 comprising an amino acid sequence of SEQ ID NO: 61 or SEQ ID NO: 425, a CDR2 comprising an amino acid sequence of SEQ ID NO: 62, and CDR3 a comprising an amino acid sequence of SEQ ID NO: 63;
   wherein each CDR independently comprises 0, 1, 2, or 3 amino acid changes relative to the sequence.

[0054] In some embodiments, the anti-IL2Rβ VHH antibody comprises a complementarity determining region 1 (CDR1) comprising an amino acid sequence of SEQ ID NO: 25 or SEQ ID NO: 416, a CDR2 comprising an amino acid sequence of SEQ ID NO: 26, and CDR3 a comprising an amino acid sequence of SEQ ID NO: 27; and the anti-IL2Rγ VHH antibody comprises:
[0055] i) a CDR1 comprising an amino acid sequence of SEQ ID NO: 41 or SEQ ID NO: 420, a CDR2 comprising an amino acid sequence of SEQ ID NO: 42, and CDR3 a comprising an amino acid sequence of SEQ ID NO: 43;
[0056] ii) a CDR1 comprising an amino acid sequence of SEQ ID NO: 45 or SEQ ID NO: 421, a CDR2 comprising an amino acid sequence of SEQ ID NO: 46, and CDR3 a comprising an amino acid sequence of SEQ ID NO: 47;
[0057] iii) a CDR1 comprising an amino acid sequence of SEQ ID NO: 49 or SEQ ID NO: 422, a CDR2 comprising an amino acid sequence of SEQ ID NO: 50, and CDR3 a comprising an amino acid sequence of SEQ ID NO: 51;
[0058] iv) a CDR1 comprising an amino acid sequence of SEQ ID NO: 53 or SEQ ID NO: 423, a CDR2 comprising an amino acid sequence of SEQ ID NO: 54, and CDR3 a comprising an amino acid sequence of SEQ ID NO: 55;
[0059] v) a CDR1 comprising an amino acid sequence of SEQ ID NO: 57 or SEQ ID NO: 424, a CDR2 comprising an amino acid sequence of SEQ ID NO: 58, and CDR3 a comprising an amino acid sequence of SEQ ID NO: 59;
[0060] vi) a CDR1 comprising an amino acid sequence of SEQ ID NO: 61 or SEQ ID NO: 425, a CDR2 comprising an amino acid sequence of SEQ ID NO: 62, and CDR3 a comprising an amino acid sequence of SEQ ID NO: 63;
   wherein each CDR independently comprises 0, 1, 2, or 3 amino acid changes relative to the sequence.

[0061] In some embodiments, the anti-IL2Rβ VHH antibody comprises a complementarity determining region 1 (CDR1) comprising an amino acid sequence of SEQ ID NO: 29 or SEQ ID NO: 417, a CDR2 comprising an amino acid sequence of SEQ ID NO: 30, and CDR3 a comprising an amino acid sequence of SEQ ID NO: 31; and the anti-IL2Rγ VHH antibody comprises:
[0062] i) a CDR1 comprising an amino acid sequence of SEQ ID NO: 41 or SEQ ID NO: 420, a CDR2 comprising an amino acid sequence of SEQ ID NO: 42, and CDR3 a comprising an amino acid sequence of SEQ ID NO: 43;
[0063] ii) a CDR1 comprising an amino acid sequence of SEQ ID NO: 45 or SEQ ID NO: 421, a CDR2 comprising an amino acid sequence of SEQ ID NO: 46, and CDR3 a comprising an amino acid sequence of SEQ ID NO: 47;
[0064] iii) a CDR1 comprising an amino acid sequence of SEQ ID NO: 49 or SEQ ID NO: 422, a CDR2 comprising an amino acid sequence of SEQ ID NO: 50, and CDR3 a comprising an amino acid sequence of SEQ ID NO: 51;
[0065] iv) a CDR1 comprising an amino acid sequence of SEQ ID NO: 53 or SEQ ID NO: 423, a CDR2 comprising an amino acid sequence of SEQ ID NO: 54, and CDR3 a comprising an amino acid sequence of SEQ ID NO: 55;
[0066] v) a CDR1 comprising an amino acid sequence of SEQ ID NO: 57 or SEQ ID NO: 424, a CDR2 comprising an amino acid sequence of SEQ ID NO: 58, and CDR3 a comprising an amino acid sequence of SEQ ID NO: 59;
[0067] vi) a CDR1 comprising an amino acid sequence of SEQ ID NO: 61 or SEQ ID NO: 425, a CDR2 comprising an amino acid sequence of SEQ ID NO: 62, and CDR3 a comprising an amino acid sequence of SEQ ID NO: 63;
   wherein each CDR independently comprises 0, 1, 2, or 3 amino acid changes relative to the sequence.

[0068] In some embodiments, the anti-IL2Rβ VHH antibody comprises a complementarity determining region 1 (CDR1) comprising an amino acid sequence of SEQ ID NO: 33 or SEQ ID NO: 418, a CDR2 comprising an amino acid sequence of SEQ ID NO: 34, and CDR3 a comprising an amino acid sequence of SEQ ID NO: 35; and the anti-IL2Rγ VHH antibody comprises:
[0069] i) a CDR1 comprising an amino acid sequence of SEQ ID NO: 41 or SEQ ID NO: 420, a CDR2 comprising an amino acid sequence of SEQ ID NO: 42, and CDR3 a comprising an amino acid sequence of SEQ ID NO: 43;
[0070] ii) a CDR1 comprising an amino acid sequence of SEQ ID NO: 45 or SEQ ID NO: 421, a CDR2 comprising an amino acid sequence of SEQ ID NO: 46, and CDR3 a comprising an amino acid sequence of SEQ ID NO: 47;
[0071] iii) a CDR1 comprising an amino acid sequence of SEQ ID NO: 49 or SEQ ID NO: 422, a CDR2 comprising an amino acid sequence of SEQ ID NO: 50, and CDR3 a comprising an amino acid sequence of SEQ ID NO: 51;
[0072] iv) a CDR1 comprising an amino acid sequence of SEQ ID NO: 53 or SEQ ID NO: 423, a CDR2 comprising an amino acid sequence of SEQ ID NO: 54, and CDR3 a comprising an amino acid sequence of SEQ ID NO: 55;
[0073] v) a CDR1 comprising an amino acid sequence of SEQ ID NO: 57 or SEQ ID NO: 424, a CDR2 comprising an amino acid sequence of SEQ ID NO: 58, and CDR3 a comprising an amino acid sequence of SEQ ID NO: 59;
[0074] vi) a CDR1 comprising an amino acid sequence of SEQ ID NO: 61 or SEQ ID NO: 425, a CDR2 comprising an amino acid sequence of SEQ ID NO: 62, and CDR3 a comprising an amino acid sequence of SEQ ID NO: 63;
   wherein each CDR independently comprises 0, 1, 2, or 3 amino acid changes relative to the sequence.

[0075] In some embodiments, the anti-IL2Rβ VHH antibody comprises a complementarity determining region 1 (CDR1) comprising an amino acid sequence of SEQ ID NO: 37 or SEQ ID NO: 419, a CDR2 comprising an amino acid sequence of SEQ ID NO: 38, and CDR3 a comprising an amino acid sequence of SEQ ID NO: 39; and the anti-IL2Rγ VHH antibody comprises:
[0076] i) a CDR1 comprising an amino acid sequence of SEQ ID NO: 41 or SEQ ID NO: 420, a CDR2 comprising an amino acid sequence of SEQ ID NO: 42, and CDR3 a comprising an amino acid sequence of SEQ ID NO: 43;
[0077] ii) a CDR1 comprising an amino acid sequence of SEQ ID NO: 45 or SEQ ID NO: 421, a CDR2 comprising an amino acid sequence of SEQ ID NO: 46, and CDR3 a comprising an amino acid sequence of SEQ ID NO: 47;
[0078] iii) a CDR1 comprising an amino acid sequence of SEQ ID NO: 49 or SEQ ID NO: 422, a CDR2 comprising an amino acid sequence of SEQ ID NO: 50, and CDR3 a comprising an amino acid sequence of SEQ ID NO: 51;
[0079] iv) a CDR1 comprising an amino acid sequence of SEQ ID NO: 53 or SEQ ID NO: 423, a CDR2 comprising an amino acid sequence of SEQ ID NO: 54, and CDR3 a comprising an amino acid sequence of SEQ ID NO: 55;
[0080] v) a CDR1 comprising an amino acid sequence of SEQ ID NO: 57 or SEQ ID NO: 424, a CDR2 comprising an amino acid sequence of SEQ ID NO: 58, and CDR3 a comprising an amino acid sequence of SEQ ID NO: 59;
[0081] vi) a CDR1 comprising an amino acid sequence of SEQ ID NO: 61 or SEQ ID NO: 425, a CDR2 comprising an amino acid sequence of SEQ ID NO: 62, and CDR3 a comprising an amino acid sequence of SEQ ID NO: 63;
   wherein each CDR independently comprises 0, 1, 2, or 3 amino acid changes relative to the sequence.

[0082] In some embodiments, the anti-IL2Rβ VHH antibody comprises:
[0083] (1) a complementarity determining region 1 (CDR1) having a sequence of any one of SEQ ID NOS: 1, 5, 9, 13, 17, 21, 25, 29, 33, and 37, 410, 411, 412, 413, 414, 415, 416, 417, 418, and 419;
[0084] (2) a CDR2 having a sequence of any one of SEQ ID NOS: 2, 6, 10, 14, 18, 22, 26, 30, 34, and 38; and
[0085] (3) a CDR3 having a sequence of any one of SEQ ID NOS: 3, 7, 11, 15, 19, 23, 27, 31, 35, and 39.

[0086] In some embodiments, the anti-IL2Rβ VHH antibody comprises CDR1, CDR2, and CDR3 sequences of an anti-IL2Rβ VHH antibody selected from the group consisting of DR214, DR217, DR583, DR584, DR585, DR586, DR587, DR588, DR589, and DR590.

[0087] In some embodiments the anti-IL2Rβ VHH antibody comprises a sequence having at least 90% identity to a sequence of any one of DR214 (SEQ ID NO: 4), DR217 (SEQ ID NO: 8), DR583 (SEQ ID NO: 12), DR584 (SEQ ID NO: 16), DR585 (SEQ ID NO: 20), DR586 (SEQ ID NO: 24), DR587 (SEQ ID NO: 28), DR588 (SEQ ID NO: 32), DR589 (SEQ ID NO: 36), and DR590 (SEQ ID NO: 40).

[0088] In some embodiments, the anti-IL2Rγ VHH antibody comprises:
[0089] (1) a complementarity determining region 1 (CDR1) having a sequence of any one of SEQ ID NOS: 41, 45, 49, 53, 57, and 61, 420, 421, 422, 423, 424, and 425;
[0090] (2) a CDR2 having a sequence of any one of SEQ ID NOS: 42, 46, 50, 54, 58, and 62; and
[0091] (3) a CDR3 having a sequence of any one of SEQ ID NOS: 43, 47, 51, 55, 59, and 63.

[0092] In some embodiments, the anti-IL2Rγ VHH antibody comprises CDR1, CDR2, and CDR3 sequences of an anti-IL2Rγ VHH antibody selected from the group consisting of DR229, DR230, DR231, DR232, DR233, and DR234.

[0093] In some embodiments, the anti-IL2Rγ VHH antibody comprises a sequence having at least 90% identity to a sequence of any one of DR229 (SEQ ID NO: 44), DR230 (SEQ ID NO: 48), DR231 (SEQ ID NO: 52), DR232 (SEQ ID NO: 56), DR233 (SEQ ID NO: 60), and DR234 (SEQ ID NO: 64).

[0094] In some embodiments, the anti-IL2Rβ VHH antibody comprises a CDR1 comprising an amino acid sequence of SEQ ID NO: 29 or SEQ ID NO: 417, a CDR2 comprising an amino acid sequence of SEQ ID NO: 30, and CDR3 a comprising an amino acid sequence of SEQ ID NO: 31; and the anti-IL2Rγ VHH antibody comprises a CDR1 comprising an amino acid sequence of SEQ ID NO: 49 or SEQ ID NO: 422, a CDR2 comprising an amino acid sequence of SEQ ID NO: 50, and CDR3 a comprising an amino acid sequence of SEQ ID NO: 51. In some embodiments the anti-IL2Rβ VHH antibody comprises a sequence having at least 90% identity to SEQ ID NO: 32. In some embodiments, the anti-IL2Rγ VHH antibody comprises a sequence having at least 90% identity to SEQ ID NO: 52. In some embodiments, the IL2R binding molecule comprises a sequence having at least 90% identity to SEQ ID NO: 76, optionally without the HHHHHH (SEQ ID NO: 127) sequence. In some embodiments, the IL2R binding molecule comprises a sequence having at least 90% identity to SEQ ID NO: 274, optionally without the HHHHHH (SEQ ID NO: 127) sequence. {DR736}

[0095] In some embodiments, the anti-IL2Rβ VHH antibody is at the N-terminus and the anti-IL2Rγ VHH antibody is at the C-terminus. In some embodiments, the binding protein comprises a sequence having at least 90% identity to a sequence of any one of SEQ ID NOS: 65-80.

[0096] In some embodiments, the anti-IL2Rγ VHH antibody is at the N-terminus and the anti-IL2Rβ VHH antibody is at the C-terminus. In some embodiments, the binding protein comprises a sequence having at least 90% identity to a sequence of any one of SEQ ID NOS: 81-106.

[0097] In some embodiments, the anti-IL2Rβ VHH antibody and the anti-IL2Rγ VHH antibody are joined by a peptide linker. In some embodiments, the peptide linker comprises between 1 and 50 amino acids.

[0098] In some embodiments, the binding protein comprises a sequence with at least 90% (e.g., 90%, 91%, 92%, 93%, 94%, 95%, 96%, 97%, 98%, 99%, or 100%) identity to a sequence of any one of SEQ ID NOS: 65-80, SEQ ID NOS: 81-106, or SEQ ID NOS: 170-289, optionally without a HHHHHHHHH (SEQ ID NO: 127) sequence.

[0099] In some embodiments, the binding protein is conjugated to an Fc polypeptide or an Fc domain.

[0100] In some embodiments, the Fc polypeptide or the Fc domain is from an IgG1, IgG2, IgG3 or IgG4.

[0101] In some embodiments, the binding protein is PEGylated.

[0102] In another aspect, the disclosure provides an IL2R binding protein that specifically binds to IL2Rβ and IL2Rγ, comprising an anti-IL2Rβ VHH antibody and an anti-IL2Rγ VHH antibody, wherein the IL2Rβ/IL2Rγ binding protein is linked to a Fc polypeptide or a Fc domain from an IgG1, IgG2, IgG3 or IgG4.

[0103] In another aspect, described herein is a heterodimeric IL2Rβ binding protein/IL2Rγ binding protein pair, the heterodimeric IL2Rβ binding protein/IL2Rγ binding protein pair comprising a first polypeptide of the formula #1:

[chemical structure]

and a second polypeptide of the formula #2:

[chemical structure]

wherein:
[0104] L1 and L2 are GSA linkers and a and b are independently selected from 0 (absent) or 1 (present);
[0105] UH1 and UH2 are each an upper hinge domain of human immunoglobulin independently selected from the group consisting of the IgG1, IgG2, IgG3 and IgG4 upper hinge, optionally comprising the amino acid substitution C220S (EU numbering);
[0106] Fc1 is a polypeptide comprising the lower hinge, CH2 and CH3 domains of a human immunoglobulin selected from the group consisting of IgG1, IgG2, IgG3 and IgG4, comprising one or more amino acid substitutions promote heterodimerization with Fc2, and
[0107] FC2 is a polypeptide comprising the lower hinge, CH2 and CH3 domains of a human immunoglobulin selected from the group consisting of IgG1, IgG2, IgG3 and IgG4, comprising one or more amino acid substitutions promote heterodimerization with Fc1, and
[0108] wherein the polypeptide of formula 1 and the polypeptide of formula 2 are linked by at least one interchain disulfide bond. In some embodiments:
   [0109] (A) the anti-IL2Rβ VHH antibody comprises a complementarity determining region 1 (CDR1) comprising an amino acid sequence of SEQ ID NO: 1 or SEQ ID NO: 410, a CDR2 comprising an amino acid sequence of SEQ ID NO: 2, and CDR3 a comprising an amino acid sequence of SEQ ID NO: 3; and wherein the anti-IL2Rγ VHH antibody comprises:
   [0110] i) a CDR1 comprising an amino acid sequence of SEQ ID NO: 41 or SEQ ID NO: 420, a CDR2 comprising an amino acid sequence of SEQ ID NO: 42, and CDR3 a comprising an amino acid sequence of SEQ ID NO: 43;
   [0111] ii) a CDR1 comprising an amino acid sequence of SEQ ID NO: 45 or SEQ ID NO: 421, a CDR2 comprising an amino acid sequence of SEQ ID NO: 46, and CDR3 a comprising an amino acid sequence of SEQ ID NO: 47;
   [0112] iii) a CDR1 comprising an amino acid sequence of SEQ ID NO: 49 or SEQ ID NO: 422, a CDR2 comprising an amino acid sequence of SEQ ID NO: 50, and CDR3 a comprising an amino acid sequence of SEQ ID NO: 51;
   [0113] iv) a CDR1 comprising an amino acid sequence of SEQ ID NO: 53 or SEQ ID NO: 423, a CDR2 comprising an amino acid sequence of SEQ ID NO: 54, and CDR3 a comprising an amino acid sequence of SEQ ID NO: 55;
   [0114] v) a CDR1 comprising an amino acid sequence of SEQ ID NO: 57 or SEQ ID NO: 424, a CDR2 comprising an amino acid sequence of SEQ ID NO: 58, and CDR3 a comprising an amino acid sequence of SEQ ID NO: 59;
   [0115] vi) a CDR1 comprising an amino acid sequence of SEQ ID NO: 61 or SEQ ID NO: 425, a CDR2 comprising an amino acid sequence of SEQ ID NO: 62, and CDR3 a comprising an amino acid sequence of SEQ ID NO: 63;
   [0116] (B) the anti-IL2Rβ VHH antibody comprises a complementarity determining region 1 (CDR1) comprising an amino acid sequence of SEQ ID NO: 5 or SEQ ID NO: 411, a CDR2 comprising an amino acid sequence of SEQ ID NO: 6, and CDR3 a comprising an amino acid sequence of SEQ ID NO: 7; and wherein the anti-IL2Rγ VHH antibody comprises:
   [0117] i) a CDR1 comprising an amino acid sequence of SEQ ID NO: 41 or SEQ ID NO: 420, a CDR2 comprising an amino acid sequence of SEQ ID NO: 42, and CDR3 a comprising an amino acid sequence of SEQ ID NO: 43;
   [0118] ii) a CDR1 comprising an amino acid sequence of SEQ ID NO: 45 or SEQ ID NO: 421, a CDR2 comprising an amino acid sequence of SEQ ID NO: 46, and CDR3 a comprising an amino acid sequence of SEQ ID NO: 47;
   [0119] iii) a CDR1 comprising an amino acid sequence of SEQ ID NO: 49 or SEQ ID NO: 422, a CDR2 comprising an amino acid sequence of SEQ ID NO: 50, and CDR3 a comprising an amino acid sequence of SEQ ID NO: 51;
   [0120] iv) a CDR1 comprising an amino acid sequence of SEQ ID NO: 53 or SEQ ID NO: 423, a CDR2 comprising an amino acid sequence of SEQ ID NO: 54, and CDR3 a comprising an amino acid sequence of SEQ ID NO: 55;
   [0121] v) a CDR1 comprising an amino acid sequence of SEQ ID NO: 57 or SEQ ID NO: 424, a CDR2 comprising an amino acid sequence of SEQ ID NO: 58, and CDR3 a comprising an amino acid sequence of SEQ ID NO: 59;
   [0122] vi) a CDR1 comprising an amino acid sequence of SEQ ID NO: 61 or SEQ ID NO: 425, a CDR2 comprising an amino acid sequence of SEQ ID NO: 62, and CDR3 a comprising an amino acid sequence of SEQ ID NO: 63;
   [0123] (C) the anti-IL2Rβ VHH antibody comprises a complementarity determining region 1 (CDR1) comprising an amino acid sequence of SEQ ID NO: 9 or SEQ ID NO: 412, a CDR2 comprising an amino acid sequence of SEQ ID NO: 10, and CDR3 a comprising an amino acid sequence of SEQ ID NO: 11; and wherein the anti-IL2Rγ VHH antibody comprises:
   [0124] i) a CDR1 comprising an amino acid sequence of SEQ ID NO: 41 or SEQ ID NO: 420, a CDR2 comprising an amino acid sequence of SEQ ID NO: 42, and CDR3 a comprising an amino acid sequence of SEQ ID NO: 43;
   [0125] ii) a CDR1 comprising an amino acid sequence of SEQ ID NO: 45 or SEQ ID NO: 421, a CDR2 comprising an amino acid sequence of SEQ ID NO: 46, and CDR3 a comprising an amino acid sequence of SEQ ID NO: 47;
   [0126] iii) a CDR1 comprising an amino acid sequence of SEQ ID NO: 49 or SEQ ID NO: 422, a CDR2 comprising an amino acid sequence of SEQ ID NO: 50, and CDR3 a comprising an amino acid sequence of SEQ ID NO: 51;
   [0127] iv) a CDR1 comprising an amino acid sequence of SEQ ID NO: 53 or SEQ ID NO: 423, a CDR2 comprising an amino acid sequence of SEQ ID NO: 54, and CDR3 a comprising an amino acid sequence of SEQ ID NO: 55;
   [0128] v) a CDR1 comprising an amino acid sequence of SEQ ID NO: 57 or SEQ ID NO: 424, a CDR2 comprising an amino acid sequence of SEQ ID NO: 58, and CDR3 a comprising an amino acid sequence of SEQ ID NO: 59;
   [0129] vi) a CDR1 comprising an amino acid sequence of SEQ ID NO: 61 or SEQ ID NO: 425, a CDR2 comprising an amino acid sequence of SEQ ID NO: 62, and CDR3 a comprising an amino acid sequence of SEQ ID NO: 63;
   [0130] (D) the anti-IL2Rβ VHH antibody comprises a complementarity determining region 1 (CDR1) comprising an amino acid sequence of SEQ ID NO: 13 or SEQ ID NO: 413, a CDR2 comprising an amino acid sequence of SEQ ID NO: 14, and CDR3 a comprising an amino acid sequence of SEQ ID NO: 15; and wherein the anti-IL2Rγ VHH antibody comprises:
   [0131] i) a CDR1 comprising an amino acid sequence of SEQ ID NO: 41 or SEQ ID NO: 420, a CDR2 comprising an amino acid sequence of SEQ ID NO: 42, and CDR3 a comprising an amino acid sequence of SEQ ID NO: 43;
   [0132] ii) a CDR1 comprising an amino acid sequence of SEQ ID NO: 45 or SEQ ID NO: 421, a CDR2 comprising an amino acid sequence of SEQ ID NO: 46, and CDR3 a comprising an amino acid sequence of SEQ ID NO: 47;
   [0133] iii) a CDR1 comprising an amino acid sequence of SEQ ID NO: 49 or SEQ ID NO: 422, a CDR2 comprising an amino acid sequence of SEQ ID NO: 50, and CDR3 a comprising an amino acid sequence of SEQ ID NO: 51;
   [0134] iv) a CDR1 comprising an amino acid sequence of SEQ ID NO: 53 or SEQ ID NO: 423, a CDR2 comprising an amino acid sequence of SEQ ID NO: 54, and CDR3 a comprising an amino acid sequence of SEQ ID NO: 55;
   [0135] v) a CDR1 comprising an amino acid sequence of SEQ ID NO: 57 or SEQ ID NO: 424, a CDR2 comprising an amino acid sequence of SEQ ID NO: 58, and CDR3 a comprising an amino acid sequence of SEQ ID NO: 59;
   [0136] vi) a CDR1 comprising an amino acid sequence of SEQ ID NO: 61 or SEQ ID NO: 425, a CDR2 comprising an amino acid sequence of SEQ ID NO: 62, and CDR3 a comprising an amino acid sequence of SEQ ID NO: 63;
   [0137] (E) the anti-IL2Rβ VHH antibody comprises a complementarity determining region 1 (CDR1) comprising an amino acid sequence of SEQ ID NO: 17 or SEQ ID NO: 414, a CDR2 comprising an amino acid sequence of SEQ ID NO: 18, and CDR3 a comprising an amino acid sequence of SEQ ID NO: 19; and wherein the anti-IL2Rγ VHH antibody comprises:
   [0138] i) a CDR1 comprising an amino acid sequence of SEQ ID NO: 41 or SEQ ID NO: 420, a CDR2 comprising an amino acid sequence of SEQ ID NO: 42, and CDR3 a comprising an amino acid sequence of SEQ ID NO: 43;
   [0139] ii) a CDR1 comprising an amino acid sequence of SEQ ID NO: 45 or SEQ ID NO: 421, a CDR2 comprising an amino acid sequence of SEQ ID NO: 46, and CDR3 a comprising an amino acid sequence of SEQ ID NO: 47;
   [0140] iii) a CDR1 comprising an amino acid sequence of SEQ ID NO: 49 or SEQ ID NO: 422, a CDR2 comprising an amino acid sequence of SEQ ID NO: 50, and CDR3 a comprising an amino acid sequence of SEQ ID NO: 51;
   [0141] iv) a CDR1 comprising an amino acid sequence of SEQ ID NO: 53 or SEQ ID NO: 423, a CDR2 comprising an amino acid sequence of SEQ ID NO: 54, and CDR3 a comprising an amino acid sequence of SEQ ID NO: 55;
   [0142] v) a CDR1 comprising an amino acid sequence of SEQ ID NO: 57 or SEQ ID NO: 424, a CDR2 comprising an amino acid sequence of SEQ ID NO: 58, and CDR3 a comprising an amino acid sequence of SEQ ID NO: 59;
   [0143] vi) a CDR1 comprising an amino acid sequence of SEQ ID NO: 61 or SEQ ID NO: 425, a CDR2 comprising an amino acid sequence of SEQ ID NO: 62, and CDR3 a comprising an amino acid sequence of SEQ ID NO: 63;
   [0144] (F) the anti-IL2Rβ VHH antibody comprises a complementarity determining region 1 (CDR1) comprising an amino acid sequence of SEQ ID NO: 21 or SEQ ID NO: 415, a CDR2 comprising an amino acid sequence of SEQ ID NO: 122, and CDR3 a comprising an amino acid sequence of SEQ ID NO: 23; and wherein the anti-IL2Rγ VHH antibody comprises:
   [0145] i) a CDR1 comprising an amino acid sequence of SEQ ID NO: 41 or SEQ ID NO: 420, a CDR2 comprising an amino acid sequence of SEQ ID NO: 42, and CDR3 a comprising an amino acid sequence of SEQ ID NO: 43;
   [0146] ii) a CDR1 comprising an amino acid sequence of SEQ ID NO: 45 or SEQ ID NO: 421, a CDR2 comprising an amino acid sequence of SEQ ID NO: 46, and CDR3 a comprising an amino acid sequence of SEQ ID NO: 47;
   [0147] iii) a CDR1 comprising an amino acid sequence of SEQ ID NO: 49 or SEQ ID NO: 422, a CDR2 comprising an amino acid sequence of SEQ ID NO: 50, and CDR3 a comprising an amino acid sequence of SEQ ID NO: 51;
   [0148] iv) a CDR1 comprising an amino acid sequence of SEQ ID NO: 53 or SEQ ID NO: 423, a CDR2 comprising an amino acid sequence of SEQ ID NO: 54, and CDR3 a comprising an amino acid sequence of SEQ ID NO: 55;
   [0149] v) a CDR1 comprising an amino acid sequence of SEQ ID NO: 57 or SEQ ID NO: 424, a CDR2 comprising an amino acid sequence of SEQ ID NO: 58, and CDR3 a comprising an amino acid sequence of SEQ ID NO: 59;
   [0150] vi) a CDR1 comprising an amino acid sequence of SEQ ID NO: 61 or SEQ ID NO: 425, a CDR2 comprising an amino acid sequence of SEQ ID NO: 62, and CDR3 a comprising an amino acid sequence of SEQ ID NO: 63;
   [0151] (G) the anti-IL2Rβ VHH antibody comprises a complementarity determining region 1 (CDR1) comprising an amino acid sequence of SEQ ID NO: 25 or SEQ ID NO: 416, a CDR2 comprising an amino acid sequence of SEQ ID NO: 26, and CDR3 a comprising an amino acid sequence of SEQ ID NO: 27; and wherein the anti-IL2Rγ VHH antibody comprises:
   [0152] i) a CDR1 comprising an amino acid sequence of SEQ ID NO: 41 or SEQ ID NO: 420, a CDR2 comprising an amino acid sequence of SEQ ID NO: 42, and CDR3 a comprising an amino acid sequence of SEQ ID NO: 43;
   [0153] ii) a CDR1 comprising an amino acid sequence of SEQ ID NO: 45 or SEQ ID NO: 421, a CDR2 comprising an amino acid sequence of SEQ ID NO: 46, and CDR3 a comprising an amino acid sequence of SEQ ID NO: 47;
   [0154] iii) a CDR1 comprising an amino acid sequence of SEQ ID NO: 49 or SEQ ID NO: 422, a CDR2 comprising an amino acid sequence of SEQ ID NO: 50, and CDR3 a comprising an amino acid sequence of SEQ ID NO: 51;
   [0155] iv) a CDR1 comprising an amino acid sequence of SEQ ID NO: 53 or SEQ ID NO: 423, a CDR2 comprising an amino acid sequence of SEQ ID NO: 54, and CDR3 a comprising an amino acid sequence of SEQ ID NO: 55;
   [0156] v) a CDR1 comprising an amino acid sequence of SEQ ID NO: 57 or SEQ ID NO: 424, a CDR2 comprising an amino acid sequence of SEQ ID NO: 58, and CDR3 a comprising an amino acid sequence of SEQ ID NO: 59;
   [0157] vi) a CDR1 comprising an amino acid sequence of SEQ ID NO: 61 or SEQ ID NO: 425, a CDR2 comprising an amino acid sequence of SEQ ID NO: 62, and CDR3 a comprising an amino acid sequence of SEQ ID NO: 63;
   [0158] (H) the anti-IL2Rβ VHH antibody comprises a complementarity determining region 1 (CDR1) comprising an amino acid sequence of SEQ ID NO: 29 or SEQ ID NO: 417, a CDR2 comprising an amino acid sequence of SEQ ID NO: 30, and CDR3 a comprising an amino acid sequence of SEQ ID NO: 31; and wherein the anti-IL2Rγ VHH antibody comprises:
   [0159] i) a CDR1 comprising an amino acid sequence of SEQ ID NO: 41 or SEQ ID NO: 420, a CDR2 comprising an amino acid sequence of SEQ ID NO: 42, and CDR3 a comprising an amino acid sequence of SEQ ID NO: 43;
   [0160] ii) a CDR1 comprising an amino acid sequence of SEQ ID NO: 45 or SEQ ID NO: 421, a CDR2 comprising an amino acid sequence of SEQ ID NO: 46, and CDR3 a comprising an amino acid sequence of SEQ ID NO: 47;
   [0161] iii) a CDR1 comprising an amino acid sequence of SEQ ID NO: 49 or SEQ ID NO: 422, a CDR2 comprising an amino acid sequence of SEQ ID NO: 50, and CDR3 a comprising an amino acid sequence of SEQ ID NO: 51;
   [0162] iv) a CDR1 comprising an amino acid sequence of SEQ ID NO: 53 or SEQ ID NO: 423, a CDR2 comprising an amino acid sequence of SEQ ID NO: 54, and CDR3 a comprising an amino acid sequence of SEQ ID NO: 55;
   [0163] v) a CDR1 comprising an amino acid sequence of SEQ ID NO: 57 or SEQ ID NO: 424, a CDR2 comprising an amino acid sequence of SEQ ID NO: 58, and CDR3 a comprising an amino acid sequence of SEQ ID NO: 59;
   [0164] vi) a CDR1 comprising an amino acid sequence of SEQ ID NO: 61 or SEQ ID NO: 425, a CDR2 comprising an amino acid sequence of SEQ ID NO: 62, and CDR3 a comprising an amino acid sequence of SEQ ID NO: 63;
   [0165] (I) the anti-IL2Rβ VHH antibody comprises a complementarity determining region 1 (CDR1) comprising an amino acid sequence of SEQ ID NO: 33 or SEQ ID NO: 418, a CDR2 comprising an amino acid sequence of SEQ ID NO: 34, and CDR3 a comprising an amino acid sequence of SEQ ID NO: 35; and wherein the anti-IL2Rγ VHH antibody comprises:
   [0166] i) a CDR1 comprising an amino acid sequence of SEQ ID NO: 41 or SEQ ID NO: 420, a CDR2 comprising an amino acid sequence of SEQ ID NO: 42, and CDR3 a comprising an amino acid sequence of SEQ ID NO: 43;
   [0167] ii) a CDR1 comprising an amino acid sequence of SEQ ID NO: 45 or SEQ ID NO: 421, a CDR2 comprising an amino acid sequence of SEQ ID NO: 46, and CDR3 a comprising an amino acid sequence of SEQ ID NO: 47;
   [0168] iii) a CDR1 comprising an amino acid sequence of SEQ ID NO: 49 or SEQ ID NO: 422, a CDR2 comprising an amino acid sequence of SEQ ID NO: 50, and CDR3 a comprising an amino acid sequence of SEQ ID NO: 51;
   [0169] iv) a CDR1 comprising an amino acid sequence of SEQ ID NO: 53 or SEQ ID NO: 423, a CDR2 comprising an amino acid sequence of SEQ ID NO: 54, and CDR3 a comprising an amino acid sequence of SEQ ID NO: 55;
   [0170] v) a CDR1 comprising an amino acid sequence of SEQ ID NO: 57 or SEQ ID NO: 424, a CDR2 comprising an amino acid sequence of SEQ ID NO: 58, and CDR3 a comprising an amino acid sequence of SEQ ID NO: 59;
   [0171] vi) a CDR1 comprising an amino acid sequence of SEQ ID NO: 61 or SEQ ID NO: 425, a CDR2 comprising an amino acid sequence of SEQ ID NO: 62, and CDR3 a comprising an amino acid sequence of SEQ ID NO: 63;
   [0172] (J) the anti-IL2Rβ VHH antibody comprises a complementarity determining region 1 (CDR1) comprising an amino acid sequence of SEQ ID NO: 37 or SEQ ID NO: 419, a CDR2 comprising an amino acid sequence of SEQ ID NO: 38, and CDR3 a comprising an amino acid sequence of SEQ ID NO: 39; and wherein the anti-IL2Rγ VHH antibody comprises:
   [0173] i) a CDR1 comprising an amino acid sequence of SEQ ID NO: 41 or SEQ ID NO: 420, a CDR2 comprising an amino acid sequence of SEQ ID NO: 42, and CDR3 a comprising an amino acid sequence of SEQ ID NO: 43;
   [0174] ii) a CDR1 comprising an amino acid sequence of SEQ ID NO: 45 or SEQ ID NO: 421, a CDR2 comprising an amino acid sequence of SEQ ID NO: 46, and CDR3 a comprising an amino acid sequence of SEQ ID NO: 47;
   [0175] iii) a CDR1 comprising an amino acid sequence of SEQ ID NO: 49 or SEQ ID NO: 422, a CDR2 comprising an amino acid sequence of SEQ ID NO: 50, and CDR3 a comprising an amino acid sequence of SEQ ID NO: 51;
   [0176] iv) a CDR1 comprising an amino acid sequence of SEQ ID NO: 53 or SEQ ID NO: 423, a CDR2 comprising an amino acid sequence of SEQ ID NO: 54, and CDR3 a comprising an amino acid sequence of SEQ ID NO: 55;
   [0177] v) a CDR1 comprising an amino acid sequence of SEQ ID NO: 57 or SEQ ID NO: 424, a CDR2 comprising an amino acid sequence of SEQ ID NO: 58, and CDR3 a comprising an amino acid sequence of SEQ ID NO: 59;
   [0178] vi) a CDR1 comprising an amino acid sequence of SEQ ID NO: 61 or SEQ ID NO: 425, a CDR2 comprising an amino acid sequence of SEQ ID NO: 62, and CDR3 a comprising an amino acid sequence of SEQ ID NO: 63;
   [0179] wherein each CDR independently comprises 0, 1, 2, or 3 amino acid changes relative to the sequence.

[0180] In some embodiments, the anti-IL2Rβ VHH antibody comprises:
[0181] a CDR1 having at least 90% (e.g., 91%, 92%, 93%, 94%, 95%, 96%, 97%, 98%, 99%, or 100%) sequence identity, or having 0, 1, 2, or 3 amino acid changes, optionally conservative amino acid changes relative, to the sequence of any CDR1 in a row of Table 30 or Table 31; a CDR2 having at least 90% (e.g., 91%, 92%, 93%, 94%, 95%, 96%, 97%, 98%, 99%, or 100%) sequence identity, or having 0, 1, 2, or 3 amino acid changes, optionally conservative amino acid changes relative, to the sequence of any CDR2 in a row of Table 30 or Table 31; and
[0182] a CDR3 having at least 90% (e.g., 91%, 92%, 93%, 94%, 95%, 96%, 97%, 98%, 99%, or 100%) sequence identity, or having 0, 1, 2, or 3 amino acid changes, optionally conservative amino acid changes relative, to the sequence of any CDR3 listed in Table 30 or Table 31; and the anti-IL2Rγ VHH antibody comprises:
[0183] a CDR1 having at least 90% (e.g., 91%, 92%, 93%, 94%, 95%, 96%, 97%, 98%, 99%, or 100%) sequence identity, or having 0, 1, 2, or 3 amino acid changes, optionally conservative amino acid changes relative, to the sequence of any CDR1 listed in Table 32 or Table 33; a CDR2 having at least 90% (e.g., 91%, 92%, 93%, 94%, 95%, 96%, 97%, 98%, 99%, or 100%) sequence identity, or having 0, 1, 2, or 3 amino acid changes, optionally conservative amino acid changes relative, to the sequence of any CDR2 listed in Table 32 or Table 33; and a CDR3 having at least 90% (e.g., 91%, 92%, 93%, 94%, 95%, 96%, 97%, 98%, 99%, or 100%) sequence identity, or having 0, 1, 2, or 3 amino acid changes, optionally conservative amino acid changes relative, to the sequence of any CDR3 listed in Table 32 or Table 33.

[0184] In some embodiments, the anti-IL2Rβ VHH antibody comprises an amino acid sequence having at least 90% (e.g., 91%, 92%, 93%, 94%, 95%, 96%, 97%, 98%, 99%, or 100%) sequence identity) to a sequence in a row of Table 34 or Table 35.

[0185] In some embodiments, the anti-IL2Rγ VHH antibody comprises an amino acid sequence having at least 90% (e.g., 91%, 92%, 93%, 94%, 95%, 96%, 97%, 98%, 99%, or 100%) sequence identity) to a sequence in a row of Table 36 or Table 37.

[0186] In another aspect, the disclosure provides an isolated nucleic acid encoding an IL2R binding protein, or a heterodimeric IL2Rβ binding protein/IL2Rγ binding protein pair as described herein.

[0187] In another aspect, the disclosure provides an expression vector comprising the nucleic acid described herein.

[0188] In another aspect, the disclosure provides an isolated host cell comprising the vector comprising the nucleic acid described herein.

[0189] In another aspect, the disclosure provides a pharmaceutical composition comprising the IL2R binding protein or a heterodimeric IL2Rβ binding protein/IL2Rγ binding protein pair described herein and a pharmaceutically acceptable carrier.

[0190] In another aspect, the disclosure provides a method of treating a neoplastic disease in a subject in need thereof, comprising administering to the subject a therapeutically effective amount of an IL2R binding protein or a heterodimeric IL2Rβ binding protein/IL2Rγ binding protein pair described herein, or a pharmaceutical composition comprising (i) the IL2R binding protein or (ii) the heterodimeric IL2Rβ binding protein/IL2Rγ binding protein pair described herein and a pharmaceutically acceptable carrier.

[0191] In some embodiments of this aspect, the method further comprises the administration of a supplementary agent to the subject. In some embodiments the supplementary agent is selected from the group consisting of a chemotherapeutic agent, an a therapeutic antibody, an immune checkpoint modulator, a TIL, a CAR-T cell, and a physical method. In some embodiments the therapeutic antibody is an antibody that binds to at least one tumor antigen selected from the group consisting of HER2, nectin-4, CD79, CTLA4, CD22, CCR4, IL23p19, PDL1, IL17a, CD38, SLAMF7, CD20, CD30, CD33, CD52, EpCam, CEA, fpA33, TAG-72, CAIX, PSMA, PSA, folate binding protein, GD2, GD3, IL6, GM2, Ley, VEGF, VEGFR, VEGFR2, PDGFR, EGFR, ERBB2, ERBB3, MET, IGF1R, EPHA3, TRAIL R1, TRAIL R2, RANKL RAP, tenascin, integrin V 3, and integrin 4 1.

[0192] In some embodiments the neoplastic disease disorder is selected from the group consisting of: adenomas, fibromas, hemangiomas, hyperplasia, atypia, metaplasia, dysplasia, carcinomas, leukemias, breast cancers, sarcomas, leukemias, lymphomas, genitourinary cancers, ovarian cancers, urethral cancers, bladder cancers, prostate cancers, gastrointestinal cancers, colon cancers, esophageal cancers, stomach cancers, lung cancers; myelomas; pancreatic cancers; liver cancers; kidney cancers; endocrine cancers; skin cancers; gliomas, neuroblastomas, astrocytomas, myelodysplastic disorders; cervical carcinoma-in-situ; intestinal polyposes; oral leukoplakias; histiocytoses, hyperprofroliferative scars including keloid scars, respiratory system carcinomas, gastrointestinal system carcinomas, genitourinary system carcinomas, testicular carcinomas, breast carcinomas, prostatic carcinomas, endocrine system carcinomas, melanomas, adenocarcinomas, myeloproliferative neoplasms, myeloid and lymphoid disorders with eosinophilia, myeloproliferative/myelodysplastic neoplasms, myelodysplastic syndromes, acute myeloid leukemia and related precursor neoplasms, and acute leukemia of ambiguous lineage, promyeloid leukemia (APML), acute myelogenous leukemia (AML) and chronic myelogenous leukemia (CML), precursor lymphoid neoplasms, mature B-cell neoplasms, mature T-cell neoplasms, Hodgkin's Lymphoma, and immunodeficiency-associated lymphoproliferative disorders, lymphoblastic leukemia (ALL) which includes B-lineage ALL and T-lineage ALL, chronic lymphocytic leukemia (CLL), prolymphocytic leukemia (PLL), hairy cell leukemia (HLL) and Waldenstrom's macroglobulinemia (WM). erythroblastic leukemia and acute megakaryoblastic leukemia, malignant lymphomas including, but are not limited to, non-Hodgkins lymphoma and variants thereof, peripheral T cell lymphomas, adult T-cell leukemia/lymphoma (ATL), cutaneous T cell lymphoma (CTCL), large granular lymphocytic leukemia (LGF), Hodgkin's disease and Reed-Stemberg disease.

[0193] In another aspect, the disclosure provides a method of treating an autoimmune or inflammatory disease, disorder, or condition or a viral infection in a subject in need thereof, comprising administering to the subject a therapeutically effective amount of an IL2R binding protein, or a heterodimeric IL2Rβ binding protein/IL2Rγ binding protein pair described herein or a pharmaceutical composition comprising (i) the IL2R binding protein or (ii) the heterodimeric IL2Rβ binding protein/IL2Rγ binding protein pair described herein and a pharmaceutically acceptable carrier.

[0194] In some embodiments of this aspect, the method further comprises administering one or more supplementary agents selected from the group consisting of a corticosteroid, a Janus kinase inhibitor, a calcineurin inhibitor, a mTor inhibitor, an IMDH inhibitor, a biologic, a vaccine, and a therapeutic antibody. In certain embodiments the therapeutic antibody is an antibody that binds a protein selected from the group consisting of BLyS, CD11a, CD20, CD25, CD3, CD52, IgEIL12/IL23, IL17a, IL1β, IL4Rα, IL5, IL6R, integrin-α4β7, RANKL, TNFα, VEGF-A, and VLA-4.

[0195] In some embodiments of this aspect, the disease, disorder, or condition is selected from viral infections, heliobacter pylori infection, HTLV, organ rejection, graft versus host disease, autoimmune thyroid disease, multiple sclerosis, allergy, asthma, neurodegenerative diseases including Alzheimer's disease, systemic lupus erythramatosis (SLE), autoinflammatory diseases, inflammatory bowel disease (IBD), Crohn's disease, diabetes, cartilage inflammation, arthritis, rheumatoid arthritis, juvenile arthritis, juvenile rheumatoid arthritis, juvenile rheumatoid arthritis, polyarticular juvenile rheumatoid arthritis, systemic onset juvenile rheumatoid arthritis, juvenile ankylosing spondylitis, juvenile enteropathic arthritis, juvenile reactive arthritis, juvenile Reiter's Syndrome, SEA Syndrome, juvenile dermatomyositis, juvenile psoriatic arthritis, juvenile scleroderma, juvenile systemic lupus erythematosus, juvenile vasculitis, pauciarticular rheumatoidarthritis, polyarticular rheumatoidarthritis, systemic onset rheumatoidarthritis, ankylosing spondylitis, enteropathic arthritis, reactive arthritis, Reiter's syndrome, SEA Syndrome, psoriasis, psoriatic arthritis, dermatitis (eczema), exfoliative dermatitis or atopic dermatitis, pityriasis rubra pilaris, pityriasis rosacea, parapsoriasis, pityriasis lichenoiders, lichen planus, lichen nitidus, ichthyosiform dermatosis, keratodermas, dermatosis, alopecia areata, pyoderma gangrenosum, vitiligo, pemphigoid, urticaria, prokeratosis, rheumatoid arthritis; seborrheic dermatitis, solar dermatitis; seborrheic keratosis, senile keratosis, actinic keratosis, photo-induced keratosis, keratosis follicularis; acne vulgaris; keloids; nevi; warts including verruca, condyloma or condyloma acuminatum, and human papilloma viral (HPV) infections.

[0196] In another aspect, the disclosure provides a method to selectively induce proliferation of a first cell type over a second cell type, comprising contacting a population of cells comprising both the first and second cell types with an IL2 binding protein, or an heterodimeric IL2Rβ binding protein/IL2Rγ binding protein pair desribed herein, thereby selectively inducing proliferation in one or more of the first cell type over one or more of the second cell type.

[0197] In some embodiments the first cell type is T cells and the second cell type is NK cells. In some embodiments the first cell type is NK cells and the second cell type is T cells. In some embodiments, the number of cells of the first cell type is at least 1.2 (e.g., at least 1.4, 1.6, 1.8, 2, 2.2, 2.4, 2.6, 2.8, 3, 3.2, 3.4, 3.6, 3.8, 4, 6, 8, 10, 12, 14, 16, 18, or 20) fold more than the number of cells of the second cell type.

### BRIEF DESCRIPTION OF THE FIGURES

[0198] FIG. 1 of the attached drawings provides a schematic representation of one embodiment of the binding molecule of the present disclosure comprising a first single domain antibody (1) and a second single domain antibody (3) and a linker (2) depicted as interacting with a cell membrane (10) associated heterodimeric receptor comprising a first receptor subunit comprising an extracellular domain (4), and transmembrane domain (5) and an intracellular domain (6) nteraction of a binding molecule and a second first receptor subunit comprising an extracellular domain (7), and transmembrane domain (8) and an intracellular domain (9) wherein the intracellular domain of the first receptor (6) and the intracellular domain of the second receptor (9) on of a binding molecule are within a proximal distance (11).

[0199] FIG. 2 of the attached drawings provides a schematic representation of two illustrative configurations of binding molecules of the present disclosure. Panel A provides a schematic representation of an illustrative binding molecule comprising a first single domain antibody (1) and a second single domain antibody (3) and a linker (2). Panel B provides a schematic representation of a binding molecule comprising two polypeptide chains, the first polypeptide chain comprising (from amino to carboxy) a first single domain antibody (1), a linker sequence (2), a second single domain antibody (3), an IgG hinge sequence (12) and an Fc knob domain (13) and a second polypeptide comprising an Fc hole (14) wherein the first and second polypeptides are in stable association via the interaction of the knob-into-hole Fc domain.

[0200] FIG. 3 of the attached drawings provides a schematic representations of two illustrative configurations of binding molecules of the present disclosure. Panel A provides a schematic representation of an illustrative binding molecule construct comprising two binding molecules each attached to a subunit of a knob-into-hole Fc domain, the construct comprising two polypeptide chains, the first polypeptide chain comprising, from amino to carboxy, a first single domain antibody (1), a linker (2) and a second single domain antibody (3), a IgG hinge sequence (12) and a Fc knob subunit (13) and a second polypeptide chain comprising, from amino to carboxy, a first single domain antibody (1), a linker (2) and a second single domain antibody (3), a IgG hinge sequence (12) and a Fc hole subunit (14) wherein the first and second polypeptides are in stable association via the interaction of the knob-into-hole Fc domain. Panel B provides schematic representation of a an alternative arrangement of a binding molecule construct comprising two polypeptides a first polypeptide chain comprising, from amino to carboxy, a first single domain antibody (1), a linker (2) and a second single domain antibody (3), an IgG hinge sequence (12) and a Fc knob subunit (13) and a second polypeptide chain comprising, from amino to carboxy, a first second domain antibody (3), a linker (2) and a first single domain antibody (1), a IgG hinge sequence (12) and a Fc hole subunit (14), wherein the first and second polypeptides are in stable association via the interaction of the knob-into-hole Fc domain.

[0201] FIG. 4, Panel A provides alternative schematic representations of configurations of the binding molecules of the present disclosure where one single domain antibody is attached to each subunit of a knob-into-hole Fc domain comprising two polypeptides, the first polypeptide comprising from amino to carboxy, a first single domain antibody (1), an IgG hinge sequence (12) and a Fc knob subunit (13), the second polypeptide comprising from amino to carboxy, a second single domain antibody (3), an IgG hinge sequence (12) and a Fc hole subunit (14), wherein the first and second single domain antibodies are in stable associate via the interaction of the knob-into-hole Fc domain.

[0202] FIG. 4, Panel B provides a schematic representations of a binding molecule where the binding domains are single domain antibodies associated via transition metal coordinate covalent complex. As illustrated, the binding molecules comprises two polypeptide subunits: the first subunit comprising a first single domain antibody (1) is attached via a first linker (15) to a first chelating peptide (17) and the second subunit comprising a second single domain antibody (3) is attached via a second linker (16) to a second chelating peptide (18), wherein the first chelating peptide (17) and second chelating peptide (18) form a coordinate covalent complex with a single transition metal ion (“M”). The transition metal ion may be in a kinetically labile or kinetically inert oxidation state.

[0203] FIG. 5 provides data with respect to IL2R binding molecules of the present disclosure on the induction of IFN gamma in NK cells measured by luminescent. This data illustrates that varying the sdAb components may provide substantial variations in activity significantly greater than wt IL2 in some instances.

[0204] FIG. 6 of the attached drawings provides data from the evaluation of T cells outgrown on PBMCs isolated from two separate donors. The data shows that the IL2R binding molecules enable selective T cell proliferation activity with respect to NK cells, even though the NK cells express the IL2Rb/g receptors. This demonstrates that variation in receptor binding affinity can be used to modulate the activity of the IL2R binding molecules in selective cell types.

[0205] FIGS. 7A-7D show different configurations of one or two IL2Rβ/IL2Rγ binding proteins conjugated to an Fc domain.

[0206] FIG. 8 shows the dose response of anti-IL2Rβ/γ VHH2s on NK cell proliferation.

[0207] FIG. 9 shows the effect on CD45 expression in CD8 and CD4 cells obtained from blood and spleen cell populations in mice in response to the anti-IL2Rβ/γ VHH2 DR638 on as evaluated by FACS (left) and, at right, the percent of CD45+CD4+ cells and CD45+CD8+ cells in both blood and spleen populations in obtained from mice in response to the administration of various test articles as more fully described in Example 21.

[0208] FIG. 10 illustrates the expression levels of various phenotypic markers on CD8+NK1.1 T cells in blood (upper row) and spleen cell (lower row) populations obtained from mice in response to the administration of various test articles as more fully described in Example 21.

[0209] FIG. 11 illustrates the expression levels of various phenotypic markers on CD8+ T cells in blood (upper row) and spleen cell (lower row) populations obtained from mice in response to the administration of various test articles as more fully described in Example 21.

[0210] FIG. 12 illustrates the expression levels of various phenotypic markers on CD4+ T cells in blood (upper row) and spleen cell (lower row) populations obtained from mice in response to the administration of various test articles as more fully described in Example 21.

[0211] FIG. 13 illustrates the expression levels of various phenotypic markers on CD4+CD25+ Tregs cells in blood (upper row) and spleen cell (lower row) populations obtained from mice in response to the administration of various test articles as more fully described in Example 21.

[0212] FIG. 14 illustrates the expression levels of various phenotypic markers on CD8+CD25+ Tregs cells in blood (upper row) and spleen cell (lower row) populations obtained from mice in response to the administration of various test articles as more fully described in Example 21.

[0213] FIG. 15 illustrates the expression levels of various phenotypic markers on CD8+Cd25 negative T cells in blood (upper row) and spleen cell (lower row) populations obtained from mice in response to the administration of various test articles as more fully described in Example 21.

[0214] FIG. 16 is a graphical representation of the survival of of hIL2Rβ/hIL2Rγ dtg and WT BL/6 mice following administration of anti-IL2Rβ/γ V_{H}H² DR638peg, DR736peg or Neoleukin. as more fully described in Example 21.

### DETAILED DESCRIPTION OF THE DISCLOSURE

### I. Introduction

[0215] The present disclosure provides compositions useful in the pairing of cellular receptors to generate desirable effects useful in treatment of diseases. In general, binding proteins are provided that comprise a first domain that binds to IL2Rβ and a second domain that binds to IL2Rγ, such that upon contacting with a cell expressing IL2Rβ and IL2Rγ, the binding protein causes the functional association of IL2Rβ and IL2Rγ, thereby resulting in functional dimerization of the receptors and downstream signaling.

[0216] Several advantages flow from the binding proteins described herein. The natral ligand of IL2R, IL2, causes IL2Rβ and IL2Rγ to come into proximity (i.e., by their simultaneous binding of IL2). However, when IL2 is used as a therapeutic in mammalian, particularly human, subjects, it may also trigger a number of adverse and undesirable effects by a variety of mechanisms including the presence of IL2Rβ and IL2Rγ on other cell types and the binding to IL2Rβ and IL2Rγ on the other cell types may result in undesirable effects and/or undesired signaling on cells expressing IL2Rβ and IL2Rγ. The present disclosure is directed to methods and compositions that modulate the multiple effects of IL2Rβ and IL2Rγ binding so that desired therapeutic signaling occurs, particularly in a desired cellular or tissue subtype, while minimizing undesired activity and/or intracellular signaling.

[0217] In some embodiments, the binding proteins described herein are designed such that the binding proteins provide the maximal desired IL2 intracellular signaling from binding to IL2Rβ and IL2Rγ on the desired cell types, while providing significantly less IL2 signaling on other undesired cell types. This can be achieved, for example, by selection of binding proteins having differing affinities or causing different Eₘₐₓ for IL2Rβ and IL2Rγ as compared to the affinity of IL2 for IL2Rβ and IL2Rγ. Because different cell types respond to the binding of ligands to its cognate receptor with different sensitivity, by modulating the affinity of the dimeric ligand (or its individual binding moieties) for the IL2 receptor relative to wild-type IL2 binding facilitates the stimulation of desired activities while reducing undesired activities on non-target cells. To measure downstream signaling activity, a number of methods are available. For example, in some embodiments, one can measure JAK/STAT signaling by the presence of phosphorylated receptors and/or phosphorylated STATs. In other embodiments, the expression of one or more downstream genes, whose expression levels can be effected by the level of downstream signalinging caused by the binding protein, can also be measured.

### II. Definitions

[0218] As used herein, the term “antibody” refers collectively to: (a) glycosylated and non-glycosylated immunoglobulins (including but not limited to mammalian immunoglobulin classes IgG1, IgG2, IgG3 and IgG4) that specifically binds to target molecule and (b) immunoglobulin derivatives including but not limited to IgG(1-4)deltaCx2, F(ab′)₂, Fab, ScFv, V_{H}, V_{L}, tetrabodies, triabodies, diabodies, dsFv, F(ab′)₃, scFv-Fc and (scFv)₂ that competes with the immunoglobulin from which it was derived for binding to the target molecule. The term antibody is not restricted to immunoglobulins derived from any particular mammalian species and includes murine, human, equine, and camelids antibodies (e.g., human antibodies).

[0219] The term antibody also includes so called “single-domain antibodies” or “sdAbs,” as well as “heavy chain antibodies” or “V_{H}Hs,” which are further defined herein. V_{H}Hs can be obtained from immunization of camelids (including camels, llamas, and alpacas (see, e.g., Hamers-Casterman, et al. (1993) Nature 363:446-448) or by screening libraries (e.g., phage libraries) constructed in V_{H}H frameworks. Antibodies having a given specificity may also be derived from non-mammalian sources such as V_{H}Hs obtained from immunization of cartilaginous fishes including, but not limited to, sharks. The term “antibody” encompasses antibodies isolatable from natural sources or from animals following immunization with an antigen and as well as engineered antibodies including monoclonal antibodies, bispecific antibodies, trispecific, chimeric antibodies, humanized antibodies, human antibodies, CDR-grafted, veneered, or deimmunized (e.g., to remove T-cell epitopes) antibodies. The term “human antibody” includes antibodies obtained from human beings as well as antibodies obtained from transgenic mammals comprising human immunoglobulin genes such that, upon stimulation with an antigen the transgenic animal produces antibodies comprising amino acid sequences characteristic of antibodies produced by human beings.

[0220] The term antibody includes both the parent antibody and its derivatives such as affinity matured, veneered, CDR grafted, humanized, camelized (in the case of V_{H}Hs), or binding molecules comprising binding domains of antibodies (e.g., CDRs) in non-immunoglobulin scaffolds.

[0221] The term “antibody” should not be construed as limited to any particular means of synthesis and includes naturally occurring antibodies isolatable from natural sources and as well as engineered antibodies molecules that are prepared by “recombinant” means including antibodies isolated from transgenic animals that are transgenic for human immunoglobulin genes or a hybridoma prepared therefrom, antibodies isolated from a host cell transformed with a nucleic acid construct that results in expression of an antibody, antibodies isolated from a combinatorial antibody library including phage display libraries. In one embodiment, an “antibody” is a mammalian immunoglobulin. In some embodiments, the antibody is a “full length antibody” comprising variable and constant domains providing binding and effector functions.

[0222] The term antibody includes antibody conjugates comprising modifications to prolong duration of action such as fusion proteins or conjugation to polymers (e.g., PEGylated).

[0223] As used herein, the term “binding protein” refers to a protein that can bind to one or more cell surface receptors or domains or subunits thereof. In some embodiments, a binding protein specifically binds to two different receptors (or domains or subunits thereof) such that the receptors (or domains or subunits) are maintained in proximity to each other such that the receptors (or domains or subunits), including domains thereof (e.g., intracellular domains) interact with each other and result in downstream signaling.

[0224] As used herein, the term “CDR” or “complementarity determining region” is intended to mean the non-contiguous antigen combining sites found within the variable region of both heavy and light chain immunoglobulin polypeptides. CDRs have been described by Kabat et al., J. Biol. Chem. 252:6609-6616 (1977); Kabat et al., U.S. Dept. of Health and Human Services, “Sequences of proteins of immunological interest” (1991) (also referred to herein as Kabat 1991); by Chothia et al., J. Mol. Biol. 196:901-917 (1987) (also referred to herein as Chothia 1987); and MacCallum et al., J. Mol. Biol. 262:732-745 (1996), where the definitions include overlapping or subsets of amino acid residues when compared against each other. Nevertheless, application of either definition to refer to a CDR of an antibody or grafted antibodies or variants thereof is intended to be within the scope of the term as defined and used herein. In the context of the present disclosure, the numbering of the CDR positions is provided according to Kabat numbering conventions. The term “Chothia Numbering” as used herein is recognized in the arts and refers to a system of numbering amino acid residues based on the location of the structural loop regions (Chothia et al. 1986, Science 233:755-758; Chothia & Lesk 1987, JMB 196:901-917; Chothia et al. 1992, JMB 227:799-817). For purposes of the present disclosure, unless otherwise specifically identified, the positioning of CDRs 2 and 3 in the variable region of an antibody follows Kabat numbering, or simply “Kabat.” The positioning of CDR1 in the variable region of an antibody can follow Kabat numbering unless indicated as determined by a hybrid of Kabat and Chothia numbering schemes.

[0225] As used herein, the term “conservative amino acid substitution” refers to an amino acid replacement that changes a given amino acid to a different amino acid with similar biochemical properties (e.g., charge, hydrophobicity, and size). For example, the amino acids in each of the following groups can be considered as conservative amino acids of each other. (1) hydrophobic amino acids: alanine, isoleucine, leucine, tryptophan, phenylalanine, valine, proline, and glycine; (2) polar amino acids: glutamine, asparagine, histidine, serine, threonine, tyrosine, methionine, and cysteine; (3) basic amino acids: lysine and arginine; and (4) acidic amino acids: aspartic acid and glutamic acid.

[0226] As used herein, the term “downstream signaling” refers to the cellular signaling process that is caused by the interaction of two or more cell surface receptors that are brought into proximity of each other.

[0227] As used herein, the term “linker” refers to a linkage between two elements, e.g., protein domains. A linker can be a covalent bond or a peptide linker. The term “bond” refers to a chemical bond, e.g., an amide bond or a disulfide bond, or any kind of bond created from a chemical reaction, e.g., chemical conjugation. The term “peptide linker” refers to an amino acid or polyeptide that may be employed to link two protein domains to provide space and/or flexibility between the two protein domains.

[0228] As used herein, the term “multimerization” refers to two or more cell surface receptors, or domains or subunits thereof, being brought in close proximity to each other such that the receptors, or domains or subunits thereof, can interact with each other and cause downstream signaling.

[0229] As used herein, the terms “N-terminus” (or “amino terminus”) and “C-terminus” (or “carboxyl terminus”) refer to the extreme amino and carboxyl ends of the polypeptide, respectively, while the terms “N-terminal” and “C-terminal” refer to relative positions in the amino acid sequence of the polypeptide toward the N-terminus and the C-terminus, respectively, and can include the residues at the N-terminus and C-terminus, respectively. “Immediately N-terminal” or “immediately C-terminal” refers to a position of a first amino acid residue relative to a second amino acid residue where the first and second amino acid residues are covalently bound to provide a contiguous amino acid sequence.

[0230] As used herein, the term “neoplastic disease” refers to disorders or conditions in a subject arising from cellular hyper-proliferation or unregulated (or dysregulated) cell replication. The term neoplastic disease refers to disorders arising from the presence of neoplasms in the subject. Neoplasms may be classified as: (1) benign (2) pre-malignant (or “pre-cancerous”); and (3) malignant (or “cancerous”). The term “neoplastic disease” includes neoplastic-related diseases, disorders and conditions referring to conditions that are associated, directly or indirectly, with neoplastic disease, and includes, e.g., angiogenesis and precancerous conditions such as dysplasia.

[0231] As used herein, the terms “nucleic acid”, “nucleic acid molecule”, “polynucleotide” and the like are used interchangeably herein to refer to a polymeric form of nucleotides of any length, either deoxyribonucleotides or ribonucleotides, or analogs thereof. Non-limiting examples of polynucleotides include linear and circular nucleic acids, messenger RNA (mRNA), complementary DNA (cDNA), recombinant polynucleotides, vectors, probes, primers and the like.

[0232] As used herein, the term “percent (%) sequence identity” used in the context of nucleic acids or polypeptides, refers to a sequence that has at least 50% sequence identity with a reference sequence. Alternatively, percent sequence identity can be any integer from 50% to 100%. In some embodiments, a sequence has at least 50%, 55%, 60%, 65%, 70%, 75%, 80%, 85%, 90%, 91%, 92%, 93%, 94%, 95%, 96%, 97%, 98%, or 99% sequence identity to the reference sequence as determined with BLAST using standard parameters, as described below.

[0233] For sequence comparison, typically one sequence acts as a reference sequence, to which test sequences are compared. When using a sequence comparison algorithm, test and reference sequences are entered into a computer, subsequence coordinates are designated, if necessary, and sequence algorithm program parameters are designated. Default program parameters can be used, or alternative parameters can be designated. The sequence comparison algorithm then calculates the percent sequence identities for the test sequences relative to the reference sequence, based on the program parameters.

[0234] A comparison window includes reference to a segment of any one of the number of contiguous positions, e.g., a segment of at least 10 residues. In some embodiments, the comparison window has from 10 to 600 residues, e.g., about 10 to about 30 residues, about 10 to about 20 residues, about 50 to about 200 residues, or about 100 to about 150 residues, in which a sequence may be compared to a reference sequence of the same number of contiguous positions after the two sequences are optimally aligned.

[0235] Algorithms that are suitable for determining percent sequence identity and sequence similarity are the BLAST and BLAST 2.0 algorithms, which are described in Altschul et al. (1990) J. Mol. Biol. 215: 403-410 and Altschul et al. (1977) Nucleic Acids Res. 25: 3389-3402, respectively. Software for performing BLAST analyses is publicly available through the National Center for Biotechnology Information (NCBI) web site. The algorithm involves first identifying high scoring sequence pairs (HSPs) by identifying short words of length W in the query sequence, which either match or satisfy some positive-valued threshold score T when aligned with a word of the same length in a database sequence. T is referred to as the neighborhood word score threshold (Altschul et al, supra). These initial neighborhood word hits act as seeds for initiating searches to find longer HSPs containing them. The word hits are then extended in both directions along each sequence for as far as the cumulative alignment score can be increased. Cumulative scores are calculated using, for nucleotide sequences, the parameters M (reward score for a pair of matching residues; always >0) and N (penalty score for mismatching residues; always <0). For amino acid sequences, a scoring matrix is used to calculate the cumulative score. Extension of the word hits in each direction are halted when: the cumulative alignment score falls off by the quantity X from its maximum achieved value; the cumulative score goes to zero or below, due to the accumulation of one or more negative-scoring residue alignments; or the end of either sequence is reached. The BLAST algorithm parameters W, T, and X determine the sensitivity and speed of the alignment. The BLASTN program (for nucleotide sequences) uses as defaults a word size (W) of 28, an expectation (E) of 10, M=1, N=2, and a comparison of both strands. For amino acid sequences, the BLASTP program uses as defaults a word size (W) of 3, an expectation (E) of 10, and the BLOSUM62 scoring matrix (see Henikoff & Henikoff, Proc. Nat. Acad. Sci. USA 89:10915 (1989)).

[0236] The BLAST algorithm also performs a statistical analysis of the similarity between two sequences (see, e.g., Karlin & Altschul, Proc. Nat'l. Acad. Sci. USA 90:5873-5787 (1993)). One measure of similarity provided by the BLAST algorithm is the smallest sum probability (P(N)), which provides an indication of the probability by which a match between two nucleotide or amino acid sequences would occur by chance. For example, an amino acid sequence is considered similar to a reference sequence if the smallest sum probability in a comparison of the test amino acid sequence to the reference amino acid sequence is less than about 0.01, more preferably less than about 10⁻⁵, and most preferably less than about 10⁻²⁰.

[0237] As used herein the terms “polypeptide,” “peptide,” and “protein”, used interchangeably herein, refer to a polymeric form of amino acids of any length, which can include genetically coded and non-genetically coded amino acids, chemically or biochemically modified or derivatized amino acids, and polypeptides having modified polypeptide backbones. The terms include fusion proteins, including, but not limited to, fusion proteins with a heterologous amino acid sequence; fusion proteins with heterologous and homologous leader sequences; fusion proteins with or without N-terminus methionine residues; fusion proteins with immunologically tagged proteins; fusion proteins of immunologically active proteins (e.g., antigenic diphtheria or tetanus toxin fragments) and the like.

[0238] As used herein the terms “prevent”, “preventing”, “prevention” and the like refer to a course of action initiated with respect to a subject prior to the onset of a disease, disorder, condition or symptom thereof so as to prevent, suppress, inhibit or reduce, either temporarily or permanently, a subject's risk of developing a disease, disorder, condition or the like (as determined by, for example, the absence of clinical symptoms) or delaying the onset thereof, generally in the context of a subject predisposed due to genetic, experiential or environmental factors to having a particular disease, disorder or condition. In certain instances, the terms “prevent”, “preventing”, “prevention” are also used to refer to the slowing of the progression of a disease, disorder or condition from a present its state to a more deleterious state.

[0239] As used herein, the term “single-domain antibody” or “sdAb” refers to an antibody having a single monomeric variable antibody domain. A sdAb is able to bind selectively to a specific antigen. A VHH antibody, further defined below, is an example of a sdAb.

[0240] As used herein, the term “specifically bind” refers to the degree of selectivity or affinity for which one molecule binds to another. In the context of binding pairs (e.g., a binding protein described herein/receptor, a ligand/receptor, antibody/antigen, antibody/ligand, antibody/receptor binding pairs), a first molecule of a binding pair is said to specifically bind to a second molecule of a binding pair when the first molecule of the binding pair does not bind in a significant amount to other components present in the sample. A first molecule of a binding pair is said to specifically bind to a second molecule of a binding pair when the affinity of the first molecule for the second molecule is at least two-fold greater, alternatively at least five times greater, alternatively at least ten times greater, alternatively at least 20-times greater, or alternatively at least 100-times greater than the affinity of the first molecule for other components present in the sample.

[0241] In a particular embodiment, a VHH in a bispecific V_{H}H² binding protein described herein binds to a receptor (e.g., the first receptor or the second receptor of the natural or non-natural receptor pairs) if the equilibrium dissociation constant between the V_{H}H and the receptor is greater than about 10⁶ M, alternatively greater than about 10⁸ M, alternatively greater than about 10¹⁰ M, alternatively greater than about 10¹¹ M, alternatively greater than about 10¹⁰ M, greater than about 10¹² M as determined by, e.g., Scatchard analysis (Munsen, et al. 1980 Analyt. Biochem. 107:220-239). Specific binding may be assessed using techniques known in the art including but not limited to competition ELISA, BIACORE® assays and/or KINEXA® assays.

[0242] As used herein, the term “subject”, “recipient”, “individual”, or “patient”, refers to any mammalian subject for whom diagnosis, treatment, or therapy is desired, particularly humans. These terms can also be used interchangeably herein. “Mammal” for purposes of treatment refers to any animal classified as a mammal, including humans, domestic and farm animals, and zoo, sports, or pet animals, such as dogs, horses, cats, cows, sheep, goats, pigs, etc. In some embodiments, the mammal is a human being.

[0243] As used herein the term “T-cell” or “T cell” is used in its conventional sense to refer to a lymphocytes that differentiates in the thymus, possess specific cell-surface antigen receptors, and include some that control the initiation or suppression of cell-mediated and humoral immunity and others that lyse antigen-bearing cells. In some embodiments the T cell includes without limitation naive CD8⁺ T cells, cytotoxic CD8⁺ T cells, naive CD4⁺ T cells, helper T cells, e.g. T_{H}1, T_{H}2, T_{H}9, T_{H}11, T_{H}22, T_{FH}; regulatory T cells, e.g. T_{R}1, Tregs, inducible Tregs; memory T cells, e.g. central memory T cells, effector memory T cells, NKT cells, tumor infiltrating lymphocytes (TILs) and engineered variants of such T-cells including but not limited to CAR-T cells, recombinantly modified TILs and TCR engineered cells.

[0244] As used herein, the term “therapeutically effective amount” as used herein in reference to the administration of an agent to a subject, either alone or as part of a pharmaceutical composition or treatment regimen, in a single dose or as part of a series of doses in an amount capable of having any detectable, positive effect on any symptom, aspect, or characteristic of a disease, disorder or condition when administered to the subject. The therapeutically effective amount can be ascertained by measuring relevant physiological effects, and it may be adjusted in connection with a dosing regimen and in response to diagnostic analysis of the subject's condition, and the like. The parameters for evaluation to determine a therapeutically effective amount of an agent are determined by the physician using art accepted diagnostic criteria including but not limited to indicia such as age, weight, sex, general health, ECOG score, observable physiological parameters, blood levels, blood pressure, electrocardiogram, computerized tomography, X-ray, and the like. Alternatively, or in addition, other parameters commonly assessed in the clinical setting may be monitored to determine if a therapeutically effective amount of an agent has been administered to the subject such as body temperature, heart rate, normalization of blood chemistry, normalization of blood pressure, normalization of cholesterol levels, or any symptom, aspect, or characteristic of the disease, disorder or condition, biomarkers (such as inflammatory cytokines, IFN-7, granzyme, and the like), reduction in serum tumor markers, improvement in Response Evaluation Criteria In Solid Tumors (RECIST), improvement in Immune-Related Response Criteria (irRC), increase in duration of survival, extended duration of progression free survival, extension of the time to progression, increased time to treatment failure, extended duration of event free survival, extension of time to next treatment, improvement objective response rate, improvement in the duration of response, reduction of tumor burden, complete response, partial response, stable disease, and the like that that are relied upon by clinicians in the field for the assessment of an improvement in the condition of the subject in response to administration of an agent. As used herein the terms “Complete Response (CR),” “Partial Response (PR)” “Stable Disease (SD)” and “Progressive Disease (PD)” with respect to target lesions and the terms “Complete Response (CR),” “Incomplete Response/Stable Disease (SD)” and Progressive Disease (PD) with respect to non-target lesions are understood to be as defined in the RECIST criteria. As used herein the terms “immune-related Complete Response (irCR),” “immune-related Partial Response (irPR),” “immune-related Progressive Disease (irPD)” and “immune-related Stable Disease (irSD)” as as defined in accordance with the Immune-Related Response Criteria (irRC). As used herein, the term “Immune-Related Response Criteria (irRC)” refers to a system for evaluation of response to immunotherapies as described in Wolchok, et al. (2009) Guidelines for the Evaluation of Immune Therapy Activity in Solid Tumors: Immune-Related Response Criteria, Clinical Cancer Research 15(23): 7412-7420. A therapeutically effective amount may be adjusted over a course of treatment of a subject in connection with the dosing regimen and/or evaluation of the subject's condition and variations in the foregoing factors. In one embodiment, a therapeutically effective amount is an amount of an agent when used alone or in combination with another agent does not result in non-reversible serious adverse events in the course of administration to a mammalian subject.

[0245] The terms “treat”, “treating”, treatment” and the like refer to a course of action (such as administering a binding protein described herein, or a pharmaceutical composition comprising same) initiated with respect to a subject after a disease, disorder or condition, or a symptom thereof, has been diagnosed, observed, or the like in the subject so as to eliminate, reduce, suppress, mitigate, or ameliorate, either temporarily or permanently, at least one of the underlying causes of such disease, disorder, or condition afflicting a subject, or at least one of the symptoms associated with such disease, disorder, or condition. The treatment includes a course of action taken with respect to a subject suffering from a disease where the course of action results in the inhibition (e.g., arrests the development of the disease, disorder or condition or ameliorates one or more symptoms associated therewith) of the disease in the subject.

[0246] As used herein, the term “V_{H}H” is a type of sdAb that has a single monomeric heavy chain variable antibody domain. Such antibodies can be found in or produced from Camelid mammals (e.g., camels, llamas) which are naturally devoid of light chains.

[0247] As used herein, the term “V_{H}H²” refers to two V_{H}Hs that are joined together by way of a linker (e.g., a covalent bond or a peptide linker). A “bispecific V_{H}H²” refers to a V_{H}H² that has a first V_{H}H binding to a first receptor, or domain or subunit thereof, and a second V_{H}H binding to a second receptor, or domain or subunit thereof.

[0248] The terms “IL2Rβ,” “IL2Rb” and “IL2Rbeta” are used interchangeably. The terms “IL2Rγ,” “IL2Rg” and IL2Rgamma” are used interchangeably.

### III. Compositions and Methods

[0249] The disclosure describes IL2R binding proteins that bind to IL2Rβ and IL2Rγ or domains thereof. The various IL2R binding proteins can be screened for binding to IL2Rβ and IL2Rγ or domains thereof and for signal transduction in therapeutically relevant cell types.

[0250] The IL2R binding proteins described herein can specifically bind to IL2Rβ and IL2Rγ and can comprise an anti-IL2Rβ V_{H}H antibody and an anti-IL2Rγ V_{H}H antibody. The IL2R binding proteins described herein are also referred to as anti-IL2Rβ/γ V_{H}H². The IL2R binding protein can cause the multimerization of IL2Rβ and IL2Rγ and downstream signaling.

### Anti-IL2Rβ V_{H}H Antibody

[0251] In some embodiments, the present disclosure provides polypeptides comprising any of the anti-IL2Rβ V_{H}H antibodies described herein, e.g., a polypeptide comprising an anti-IL2Rβ V_{H}H comprising a CDR1, a CDR2, and a CDR3 selected from Table 1 below. In certain embodiments, the present disclosure provides a polypeptide comprising a set of CDR1, CDR2, and CDR3 (e.g., CDR1, CDR2, and CDR3 described in the same row) selected from a row of Table 1 below. In certain embodiments, the present disclosure provides a polypeptide comprising a sequence having at least 90% (e.g., 90%, 91%, 92%, 93%, 94%, 95%, 96%, 97%, 98%, 99%, or 100%) identity to a sequence of an anti-IL2Rβ V_{H}H antibody selected from Table 1 below. In some embodiments, a polypeptide provided by the present disclosure can comprise a dimer or multimer of two or more of anti-IL2Rβ V_{H}H antibodies as described in Table 1, in which the anti-IL2Rβ V_{H}H antibodies can be the same or different.

[0252] In some embodiments, the present disclosure provides an anti-IL2Rβ V_{H}H antibody, which may be incorporated into a multivalent binding protein as descried herein, comprising one or more of the CDR1s, CDR2s, CDR2s or V_{H}H amino acid sequences as listed in Table 1 below. In some embodiments, the anti-IL2Rβ V_{H}H antibody can comprise: (1) a CDR1 having a sequence of any one of SEQ ID NOS: 1, 5, 9, 13, 17, 21, 25, 29, 33, 37, or 410-419 or a variant thereof that has a sequence having one, two, or three amino acid substitutions relative to a sequence of any one of SEQ ID NOS: 1, 5, 9, 13, 17, 21, 25, 29, 33, 37, or 410-419; (2) a CDR2 having a sequence of any one of SEQ ID NOS: 2, 6, 10, 14, 18, 22, 26, 30, 34, and 38 or a variant thereof that has a sequence having one, two, or three amino acid substitutions relative to a sequence of any one of SEQ ID NOS: 2, 6, 10, 14, 18, 22, 26, 30, 34, and 38; (3) a CDR3 having a sequence of any one of SEQ ID NOS: 3, 7, 11, 15, 19, 23, 27, 31, 35, and 39 or a variant thereof that has a sequence having one, two, or three amino acid substitutions relative to a sequence of any one of SEQ ID NOS: 3, 7, 11, 15, 19, 23, 27, 31, 35, and 39. In some embodiments, an anti-IL2Rβ V_{H}H antibody may be modified for extended half-life (e.g., Fc conjugation, PEGylation) either alone or in the context of a multivalent binding protein as described herein. In some embodiments the moiety providing half-life extension (e.g., PEG, Fc polypeptide, or Fc domain) is conjugated, optionally via a linker, to the N-terminus of the antibody, the C-terminus of the antibody, or an internal amino acid residue (particularly via conjugation to the side chains of lysine or cysteine residues).

[0253] In some embodiments, the anti-IL2Rβ V_{H}H antibody can comprise a set of CDR1, CDR2, and CDR3 (e.g., CDR1, CDR2, and CDR3 described in the same row) selected from a row of Table 1 below. In each set of CDR1, CDR2, and CDR3, (1) the CDR1 can have the indicated sequence in the set or a variant thereof that has a sequence having one, two, or three amino acid substitutions relative to the indicated sequence; (2) the CDR2 can have the indicated sequence in the set or a variant thereof that has a sequence having one, two, or three amino acid substitutions relative to the indicated sequence; (3) the CDR3 can have the indicated sequence in the set or a variant thereof that has a sequence having one, two, or three amino acid substitutions relative to the indicated sequence.

[0254] Further, an anti-IL2Rβ V_{H}H antibody can comprise CDR1, CDR2, and CDR3 having the sequences of SEQ ID NOS: 1-3 or 410, 2 and 3. Further, an anti-IL2Rβ V_{H}H antibody can comprise CDR1, CDR2, and CDR3 having the sequences of SEQ ID NOS: 5-7 or 411, 6 and 7. Further, an anti-IL2Rβ V_{H}H antibody can comprise CDR1, CDR2, and CDR3 having the sequences of SEQ ID NOS: 9-11 or 412, 10 and 11. Further, an anti-IL2Rβ V_{H}H antibody can comprise CDR1, CDR2, and CDR3 having the sequences of SEQ ID NOS: 13-15 or 413, 14 and 15. Further, an anti-IL2Rβ V_{H}H antibody can comprise CDR1, CDR2, and CDR3 having the sequences of SEQ ID NOS: 17-19 or 414, 18 and 19. Further, an anti-IL2Rβ V_{H}H antibody can comprise CDR1, CDR2, and CDR3 having the sequences of SEQ ID NOS: 21-23 or 415, 22, and 23. Further, an anti-IL2Rβ V_{H}H antibody can comprise CDR1, CDR2, and CDR3 having the sequences of SEQ ID NOS: 25-27 or 416, 26, and 27. Further, an anti-IL2Rβ V_{H}H antibody can comprise CDR1, CDR2, and CDR3 having the sequences of SEQ ID NOS: 29-31 or 417, 30, and 31. Further, an anti-IL2Rβ V_{H}H antibody can comprise CDR1, CDR2, and CDR3 having the sequences of SEQ ID NOS: 33-35 or 418, 34, and 35. Further, an anti-IL2Rβ V_{H}H antibody can comprise CDR1, CDR2, and CDR3 having the sequences of SEQ ID NOS: 37-39 or 419, 38, and 39.

[0255] Further, an anti-IL2Rβ V_{H}H antibody can comprise CDR1, CDR2, and CDR3 having the sequences of SEQ ID NOS: 1-3, or 410, 2 and 3, respectively, and at least 90% (e.g., 90%, 91%, 92%, 93%, 94%, 95%, 96%, 97%, 98%, 99%, or 100%) identity to the sequence of SEQ ID NO: 4. Further, an anti-IL2Rβ V_{H}H antibody can comprise CDR1, CDR2, and CDR3 having the sequences of SEQ ID NOS: 5-7, or 411, 6 and 7, respectively, and at least 90% (e.g., 90%, 91%, 92%, 93%, 94%, 95%, 96%, 97%, 98%, 99%, or 100%) identity to the sequence of SEQ ID NO: 8. Further, an anti-IL2Rβ V_{H}H antibody can comprise CDR1, CDR2, and CDR3 having the sequences of SEQ ID NOS: 9-11, or 412, 10 and 11, respectively, and at least 90% (e.g., 90%, 91%, 92%, 93%, 94%, 95%, 96%, 97%, 98%, 99%, or 100%) identity to the sequence of SEQ ID NO: 12. Further, an anti-IL2Rβ V_{H}H antibody can comprise CDR1, CDR2, and CDR3 having the sequences of SEQ ID NOS: 13-15, or 413, 14 and 15, respectively, and at least 90% (e.g., 90%, 91%, 92%, 93%, 94%, 95%, 96%, 97%, 98%, 99%, or 100%) identity to the sequence of SEQ ID NO: 16. Further, an anti-IL2Rβ V_{H}H antibody can comprise CDR1, CDR2, and CDR3 having the sequences of SEQ ID NOS: 17-19, or 414, 18 and 19, respectively, and at least 90% (e.g., 90%, 91%, 92%, 93%, 94%, 95%, 96%, 97%, 98%, 99%, or 100%) identity to the sequence of SEQ ID NO: 20. Further, an anti-IL2Rβ V_{H}H antibody can comprise CDR1, CDR2, and CDR3 having the sequences of SEQ ID NOS: 21-23, or 415, 22, and 23, respectively, and at least 90% (e.g., 90%, 91%, 92%, 93%, 94%, 95%, 96%, 97%, 98%, 99%, or 100%) identity to the sequence of SEQ ID NO: 24. Further, an anti-IL2Rβ V_{H}H antibody can comprise CDR1, CDR2, and CDR3 having the sequences of SEQ ID NOS: 25-27, or 416, 26, and 27, respectively, and at least 90% (e.g., 90%, 91%, 92%, 93%, 94%, 95%, 96%, 97%, 98%, 99%, or 100%) identity to the sequence of SEQ ID NO: 28. Further, an anti-IL2Rβ V_{H}H antibody can comprise CDR1, CDR2, and CDR3 having the sequences of SEQ ID NOS: 29-31, or 417, 30, and 31, respectively, and at least 90% (e.g., 90%, 91%, 92%, 93%, 94%, 95%, 96%, 97%, 98%, 99%, or 100%) identity to the sequence of SEQ ID NO: 32.

[0256] Further, an anti-IL2Rβ V_{H}H antibody can comprise CDR1, CDR2, and CDR3 having the sequences of SEQ ID NOS: 33-35, or 418, 34, and 35, respectively, and at least 90% (e.g., 90%, 91%, 92%, 93%, 94%, 95%, 96%, 97%, 98%, 99%, or 100%) identity to the sequence of SEQ ID NO: 36. Further, an anti-IL2Rβ V_{H}H antibody can comprise CDR1, CDR2, and CDR3 having the sequences of SEQ ID NOS: 37-39, or 419, 38, and 39, respectively, and at least 90% (e.g., 90%, 91%, 92%, 93%, 94%, 95%, 96%, 97%, 98%, 99%, or 100%) identity to the sequence of SEQ ID NO: 40.

TABLE 1
Anti-IL2Rβ V_{H}H antibody sequences

| | | CDR1 | | | |
|---|---|---|---|---|---|
| V_{H}H | CDR1 | (Chothia | | | |
| Ab. | (Kabat) | /Kabat) | CDR2 | CDR3 | V_{H}H |
| DR214 | TQDMS | TQDMS | SILTPN | VDERCE | QVQLLESGGGLVQPGGSLRLSCAAS |
| | (SEQ ID | (SEQ ID | GSTYYA | AEDQID | GVRISTQDMSWVRQAPGKGLEWVSS |
| | NO: | NO: | DSVKG | Y | ILTPNGSTYYADSVKGRFTISRDNS |
| | 1) | 410) | (SEQ ID | (SEQ ID | KNTLYLQMNSLRAEDTAVYYCAGVD |
| | | | NO: | NO: | ERCEAEDQIDYWGQGTLVTVSS |
| | | | 2) | 3) | (SEQ ID NO: 4) |
| DR217 | SEDMS | SEDMS | TIASDD | FDAQDA | QVQLLESGGGLVQPGGSLRLSCAAS |
| | (SEQ ID | (SEQ ID | GSTYYA | AIEY | GDMIISEDMSWVRQAPGKGLEWVST |
| | NO: | NO: | DSVKG | (SEQ ID | IASDDGSTYYADSVKGRFTISRDNS |
| | 5) | 411) | (SEQ ID | NO: | KNTLYLQMNSLRAEDTAVYYCAGFD |
| | | | NO: | 7) | AQDAAIEYWGQGTLVTVSS |
| | | | 6) | | (SEQ ID NO: 8) |
| DR583 | TSDMS | YTYDTS | DIDSGD | IDSYWK | QVQLQESGGGSVQAGGSLRLSCVGS |
| | (SEQ ID | DMS | WAAYAD | WGKLNN | GYTYDTSDMSWYRQAPGKEREFVSD |
| | NO: | (SEQ ID | AVKG | F | IDSGDWAAYADAVKGRFTISRDNAK |
| | 9) | NO: | (SEQ ID | (SEQ ID | KTVYLQMNSLEPEDTAMYYCKASYW |
| | | 412) | NO: | NO: | KWGKLNNFWGPGTQVTVSS |
| | | | 10) | 11) | (SEQ ID NO: |
| | | | | | 12) |
| DR584 | NYGMS | FRFSNY | YINGDG | WSLSAA | GLSRDGQVQLQESGGGLVQPGGSLK |
| | (SEQ ID | GMS | SRTHYA | S | LSCAASGFRFSNYGMSWVRQAPGEG |
| | NO: | (SEQ ID | DSVKG | (SEQ ID | LEWVSYINGDGSRTHYADSVKGRFT |
| | 13) | NO: | (SEQ ID | NO: | ISRDNAKNTLYLQLNSLKTEDTAMY |
| | | 413) | NO: | 15) | YCEKGLSRDGWSLSAASRGQGTQVT |
| | | | 14) | | VSS |
| | | | | | (SEQ ID NO: 16) |
| DR585 | FNYMG | YTTYSF | VIYTGG | DDQRFA | NYMGWFRQAPGKEREGVAVIYTGGG |
| | (SEQ ID | NYMG | GSTLYA | SPLYAY | STLYADQVQLQESGGGSVQTGGSLR |
| | NO: | (SEQ ID | DSVKG | FGY | LSCAVSGYTTYSFSVKGRFTISQDN |
| | 17) | NO: | (SEQ ID | (SEQ ID | AKNTVYLQMNSLKPEDTAMYYCAAD |
| | | 414) | NO: | NO: | DQRFASPLYAYFGYWGQGTQVTVSS |
| | | | 18) | 19) | (SEQ ID NO: 20) |
| DR586 | NYWIF | FTFSNY | TSNTGG | GRCARS | QVQLQESGGGLVQPGGSLRLSCVAS |
| | (SEQ ID | WIF | DTTKYA | G | GFTFSNYWIFWVRQAAGKGLEWLST |
| | NO: | (SEQ ID | DSVKG | (SEQ ID | SNTGGDTTKYADSVKGRFTISRDSA |
| | 21) | NO: | (SEQ ID | NO: | KNTEYLQMNSLKPEDTAVYYCETGR |
| | | 415) | NO: | 23) | CARSGGYQGTQVTVSS |
| | | | 22) | | (SEQ ID NO: 24) |
| DR587 | IRCMG | DTKSIR | AIDREG | QNMCRV | QVQLQESGGGSVQVGGSLRLSCATS |
| | (SEQ ID | CMG | FATYAD | VRGAMT | GDTKSIRCMGWFRQTPGKEREGIAA |
| | NO: | (SEQ ID | SVYD | GVDY | IDREGFATYADSVYDRFTIAQDNAQ |
| | 25) | NO: | (SEQ ID | (SEQ ID | NTLYLEMNALKPEDTAMYYCAAQNM |
| | | 416) | NO: | NO: | CRVVRGAMTGVDYWGKGTQVTVSS |
| | | | 26) | 27) | (SEQ ID NO: 28) |
| DR588 | SYYCMG | YTYSSY | AIDSDG | SYEVVY | DCYPSGYCMGWFRQAPGKEREGVAA |
| | (SEQ ID | YCMG | STSYAD | GQDYSE | IDSDGSTSYADSVQVQLQESGGGSV |
| | NO: | (SEQ ID | SVKG | Q ID | QVGGSLKLSCAASGYTYSSYKGRFT |
| | 29) | NO: | (SEQ ID | NO: | ISQDDAKNTLYLQMNSLKPEDTAMY |
| | | 417:) | NO: | 31) | YCAASYEVVDCYPSGYGQDYWGKGT |
| | | | 30) | | QVTVSS |
| | | | | | (SEQ ID NO: 32) |
| DR589 | RYCMA | YTASRY | AIHPGG | GSLWVP | CMAWFRQAPGKEREGVAAIHPGGGT |
| | (SEQ ID | CMA | GTTYYA | FGDRCA | TYYADSQVQLQESGGGSVQAGGSLR |
| | NO: | (SEQ ID | DSVKG | ANY | LSCAASEYTASRYVKGRFSISQDSA |
| | 33) | NO: | (SEQ ID | (SEQ ID | DNTLYLQMNSLKPEDTAMYYCAAGS |
| | | 418) | NO: | NO: | LWVPFGDRCAANYWGQGTQVTVSS |
| | | | 34) | 35) | (SEQ ID NO: 36) |
| DR590 | RIHMT | YEYCRI | SIGSDG | EYLYGL | QVQLQESGGGSVQAGGSLRLSCAAS |
| | (SEQ ID | HMT | RKTYAN | GCPDGS | GYEYCRIHMTWYRQGPGKEREFVSS |
| | NO: | (SEQ ID | SVTG | AY | IGSDGRKTYANSVTGRFTISRDNAN |
| | 37) | NO: | (SEQ ID | (SEQ ID | HTVYLQMNSLSPEDTAMYYCKTEYL |
| | | 419) | NO: | NO: | YGLGCPDGSAYWGQGTQVTVSS |
| | | | 38) | 39) | (SEQ ID NO: 40) |

### Anti-IL2Rγ V_{H}H Antibody

[0257] In some embodiments, the present disclosure provides polypeptides comprising any of the anti-IL2Rγ V_{H}H antibodies described herein, e.g., a polypeptide comprising an anti-IL2Rγ V_{H}H comprising a CDR1, a CDR2, and a CDR3 selected from Table 2 below. In certain embodiments, the present disclosure provides a polypeptide comprising a set of CDR1, CDR2, and CDR3 (e.g., CDR1, CDR2, and CDR3 described in the same row) selected from a row of Table 2 below. In certain embodiments, the present disclosure provides a polypeptide comprising a sequence having at least 90% (e.g., 90%, 91%, 92%, 93%, 94%, 95%, 96%, 97%, 98%, 99%, or 100%) identity to a sequence of an anti-IL2Rγ V_{H}H antibody selected from Table 2 below. In some embodiments, a polypeptide provided by the present disclosure can comprise a dimer or multimer of two or more of anti-IL2Rγ V_{H}H antibodies as described in Table 2, in which the anti-IL2Rγ V_{H}H antibodies can be the same or different.

[0258] In some embodiments, the present disclosure provides an anti-IL2Rγ V_{H}H antibody, which may be incorporated into a multivalent binding protein as described herein, comprising one or more of CDR1 s, CD2s, CDR3s or V_{H}H amino acid sequences as listed in Table 2 below. In some embodiments, the anti-IL2Rγ V_{H}H antibody can comprise: (1) a CDR1 having a sequence of any one of SEQ ID NOS: 41, 45, 49, 53, 57, 61, or 420-425, or a variant thereof that has a sequence having one, two, or three amino acid substitutions relative to a sequence of any one of SEQ ID NOS: 41, 45, 49, 53, 57, 61, or 420-425; (2) a CDR2 having a sequence of any one of SEQ ID NOS: 42, 46, 50, 54, 58, and 62 or a variant thereof that has a sequence having one, two, or three amino acid substitutions relative to a sequence of any one of SEQ ID NOS: 42, 46, 50, 54, 58, and 62; (3) a CDR3 having a sequence of any one of SEQ ID NOS: 43, 47, 51, 55, 59, and 63 or a variant thereof that has a sequence having one, two, or three amino acid substitutions relative to a sequence of any one of SEQ ID NOS: 43, 47, 51, 55, 59, and 63. In some embodiments, an anti-IL2Rγ V_{H}H may be modified for extended half-life (e.g., Fc conjugation, PEGylation) either alone or in the context of a multivalent binding protein as described herein. In some embodiments the moiety providing half-life extension (e.g., PEG, Fc polypeptide, Fc domain) is conjugated, optionally via a linker, to the N-terminus of the antibody, the C-terminus of the antibody, or an internal amino acid residue (particularly via conjugation to the side chains of lysine or cysteine residues).

[0259] In some embodiments, the anti-IL2Rγ V_{H}H antibody can comprise a set of CDR1, CDR2, and CDR3 (e.g., CDR1, CDR2, and CDR3 described in the same row) selected from a row of Table 2 below. In each set of CDR1, CDR2, and CDR3, (1) the CDR1 can have the indicated sequence in the set or a variant thereof that has a sequence having one, two, or three amino acid substitutions relative to the indicated sequence; (2) the CDR2 can have the indicated sequence in the set or a variant thereof that has a sequence having one, two, or three amino acid substitutions relative to the indicated sequence; (3) the CDR3 can have the indicated sequence in the set or a variant thereof that has a sequence having one, two, or three amino acid substitutions relative to the indicated sequence.

[0260] Further, an anti-IL2Rγ V_{H}H antibody can comprise CDR1, CDR2, and CDR3 having the sequences of SEQ ID NOS: 41-43 or 420, 42, and 43. Further, an anti-IL2Rγ V_{H}H antibody can comprise CDR1, CDR2, and CDR3 having the sequences of SEQ ID NOS: 45-47 or 421, 46, and 47. Further, an anti-IL2Rγ V_{H}H antibody can comprise CDR1, CDR2, and CDR3 having the sequences of SEQ ID NOS: 49-51 or 422, 50, and 51. Further, an anti-IL2Rγ V_{H}H antibody can comprise CDR1, CDR2, and CDR3 having the sequences of SEQ ID NOS: 53-55 or 423, 54, and 55. Further, an anti-IL2Rγ V_{H}H antibody can comprise CDR1, CDR2, and CDR3 having the sequences of SEQ ID NOS: 57-59 or 424, 58, and 59. Further, an anti-IL2Rγ V_{H}H antibody can comprise CDR1, CDR2, and CDR3 having the sequences of SEQ ID NOS: 61-63 or 425, 62, and 63.

[0261] Further, an anti-IL2Rγ V_{H}H antibody can comprise CDR1, CDR2, and CDR3 having the sequences of SEQ ID NOS: 41-43, respectively, and at least 90% (e.g., 90%, 91%, 92%, 93%, 94%, 95%, 96%, 97%, 98%, 99%, or 100%) identity to the sequence of SEQ ID NO: 44. Further, an anti-IL2Rγ V_{H}H antibody can comprise CDR1, CDR2, and CDR3 having the sequences of SEQ ID NOS: 45-47, respectively, and at least 90% (e.g., 90%, 91%, 92%, 93%, 94%, 95%, 96%, 97%, 98%, 99%, or 100%) identity to the sequence of SEQ ID NO: 48. Further, an anti-IL2Rγ V_{H}H antibody can comprise CDR1, CDR2, and CDR3 having the sequences of SEQ ID NOS: 49-51, respectively, and at least 90% (e.g., 90%, 91%, 92%, 93%, 94%, 95%, 96%, 97%, 98%, 99%, or 100%) identity to the sequence of SEQ ID NO: 52. Further, an anti-IL2Rγ V_{H}H antibody can comprise CDR1, CDR2, and CDR3 having the sequences of SEQ ID NOS: 53-55, respectively, and at least 90% (e.g., 90%, 91%, 92%, 93%, 94%, 95%, 96%, 97%, 98%, 99%, or 100%) identity to the sequence of SEQ ID NO: 56. Further, an anti-IL2Rγ V_{H}H antibody can comprise CDR1, CDR2, and CDR3 having the sequences of SEQ ID NOS: 57-59, respectively, and at least 90% (e.g., 90%, 91%, 92%, 93%, 94%, 95%, 96%, 97%, 98%, 99%, or 100%) identity to the sequence of SEQ ID NO: 60. Further, an anti-IL2Rγ V_{H}H antibody can comprise CDR1, CDR2, and CDR3 having the sequences of SEQ ID NOS: 61-63, respectively, and at least 90% (e.g., 90%, 91%, 92%, 93%, 94%, 95%, 96%, 97%, 98%, 99%, or 100%) identity to the sequence of SEQ ID NO: 64.

TABLE 2
Anti-IL2Rγ V_{H}H antibody sequences

| | | CDR1 | | | |
|---|---|---|---|---|---|
| V_{H}H | CDR1 | (Chothia/ | | | |
| Ab. | (Kabat) | Kabat) | CDR2 | CDR3 | V_{H}H |
| DR229 | SYPMT | FSFSSYP | TIASD | GYGDG | QVQLQES |
| | (SEQ ID | MT | GGSTA | TPA | GGGLVQP |
| | NO: 41) | (SEQ ID | YAASV | (SEQ ID | GGSLRLS |
| | | NO: 420) | EG | NO: 43) | CTASGFS |
| | | | (SEQ ID | | FSSYPMT |
| | | | NO: 42) | | WARQAPG |
| | | | | | KGLEWVS |
| | | | | | TIASDGG |
| | | | | | STAYAAS |
| | | | | | VEGRFTI |
| | | | | | SRDNAKS |
| | | | | | TLYLQLN |
| | | | | | SLKTEDT |
| | | | | | AMYYCTK |
| | | | | | GYGDGTP |
| | | | | | APGQGTQ |
| | | | | | VTVSS |
| | | | | | (SEQ ID |
| | | | | | NO: 44) |
| DR230 | SAHMS | FTFSSAH | SIYSG | NRLHY | YSDDDSM |
| | (SEQ ID | MS | GGTFY | L | SWVRQAP |
| | NO: 45) | (SEQ ID | ADSVK | (SEQ ID | GKGREWI |
| | | NO: 421) | G | NO: 47) | ASIYSGG |
| | | | (SEQ ID | | GTFYADS |
| | | | NO: 46) | | VKGQVQL |
| | | | | | QESGGGL |
| | | | | | VQPGGSL |
| | | | | | RLSCAAS |
| | | | | | GFTFSSA |
| | | | | | HRFTISR |
| | | | | | DNAKNTL |
| | | | | | YLQLNSL |
| | | | | | KAEDTAM |
| | | | | | YYCATNR |
| | | | | | LHYYSDD |
| | | | | | DSLRGQG |
| | | | | | TQVTVSS |
| | | | | | (SEQ ID |
| | | | | | NO: 48) |
| DR231 | DREMN | FTFDDRE | TISSD | DFMIA | QVQLQES |
| | (SEQ ID | MN | GSTYY | IQAPG | GGGSVQA |
| | NO: 49) | (SEQ ID | ADSVK | AGC | GGSLRLS |
| | | NO: 422) | G | (SEQ ID | CTASGFT |
| | | | (SEQ ID | NO: 51) | FDDREMN |
| | | | NO: 50) | | WYRQAPG |
| | | | | | NECELVS |
| | | | | | TISSDGS |
| | | | | | TYYADSV |
| | | | | | KGRFTIS |
| | | | | | QDNAKNT |
| | | | | | VYLQMDS |
| | | | | | VKPEDTA |
| | | | | | VYYCAAD |
| | | | | | FMIAIQA |
| | | | | | PGAGCWG |
| | | | | | QGTQVTV |
| | | | | | SS |
| | | | | | (SEQ ID |
| | | | | | NO: 52) |
| DR232 | CMG | YTSCMG | TIYTR | GGYSW | WFRQAPG |
| | (SEQ ID | (SEQ ID | GRSIY | SAGCE | KEREAVA |
| | NO: 53) | NO: 423) | YADSV | FNY | TIYTRGR |
| | | | KG | (SEQ ID | SIYYADS |
| | | | (SEQ ID | NO: 55) | VKGRFTI |
| | | | NO: 54) | | SQDNAKN |
| | | | | | TLYLQMN |
| | | | | | SLKPEDI |
| | | | | | AMYSCAA |
| | | | | | GQVQLQE |
| | | | | | SGGGSVQ |
| | | | | | AGGSLRL |
| | | | | | SCVASGY |
| | | | | | TSCMGGY |
| | | | | | SWSAGCE |
| | | | | | FNYWGQG |
| | | | | | TQVTVSS |
| | | | | | (SEQ ID |
| | | | | | NO: 56) |
| DR233 | DSDMG | FTFDDSD | TISSD | EPRGY | QVQLQES |
| | (SEQ ID | MG | GSTYY | YSNYG | GGGSVQA |
| | NO: 57) | (SEQ ID | ADSVK | GRREC | GGSLRLS |
| | | NO: 424) | G | NY | CTASGFT |
| | | | (SEQ ID | (SEQ ID | FDDSDMG |
| | | | NO: 58) | NO: 59) | WYRQAPG |
| | | | | | NECELVS |
| | | | | | TISSDGS |
| | | | | | TYYADSV |
| | | | | | KGRFTIS |
| | | | | | QDNAKNT |
| | | | | | VYLQMNS |
| | | | | | LKPEDTA |
| | | | | | VYYCAAE |
| | | | | | PRGYYSN |
| | | | | | YGGRREC |
| | | | | | NYWGQGT |
| | | | | | QVTVSS |
| | | | | | (SEQ ID |
| | | | | | NO: 60) |
| DR234 | SYCMG | YTFSSYC | ALGGG | AWVAC | QVQLQES |
| | (SEQ ID | MG | STYYA | LEFGG | GGGSVQA |
| | NO: 61) | (SEQ ID | DSVKG | SWYDL | GGSLRLS |
| | | NO: 425) | (SEQ ID | ARYKH | CVASGYT |
| | | | NO: 62) | (SEQ ID | FSSYCMG |
| | | | | NO: 63) | WFRQAPG |
| | | | | | KEREGVA |
| | | | | | ALGGGST |
| | | | | | YYADSVK |
| | | | | | GRFTISQ |
| | | | | | DNAKNTL |
| | | | | | YLQMNSL |
| | | | | | KPEDTAM |
| | | | | | YYCAAAW |
| | | | | | VACLEFG |
| | | | | | GSWYDLA |
| | | | | | RYKHWGQ |
| | | | | | GTQVTVS |
| | | | | | S |
| | | | | | (SEQ ID |
| | | | | | NO: 64) |

Anti-IL2Rβ/γ V_{H}H²

[0262] An IL2R binding protein described herein can comprise an anti-IL2Rβ V_{H}H antibody selected from Table 1 and an anti-IL2Rγ V_{H}H antibody selected from Table 2. In some embodiments, the N-terminal V_{H}H of the IL2R binding molecule is an anti-IL2Rβ V_{H}H antibody and the C-terminal V_{H}H of the IL2R binding protein is an anti-IL2Rγ V_{H}H antibody, optionally a linker can be used between the two V_{H}H antibodies. In some embodiments, the N-terminal V_{H}H of the IL2R binding protein is an anti-IL2Rγ V_{H}H antibody and the C-terminal V_{H}H of the IL2R binding protein is an anti-IL2Rβ V_{H}H antibody, optionally a linker can be used between the two V_{H}H antibodies. Examples of linkers (e.g., GGGS (SEQ ID NO: 107)) that can be used to fuse the anti-IL2Rβ V_{H}H antibody and the anti-IL2Rγ V_{H}H antibody are described in detail further herein. In some embodiments, the IL2R binding protein may be operably linked to a metal chelating peptide. Chelating peptides include but are not limited to the Ala-Ser-His-His-His-His-His-His (“ASH6”, SEQ ID NO: 126) or the His-His-His-His-His-His (“H6”, SEQ ID NO: 127) purification handle to facilitate purification of the binding protein by chelating peptide immobilized metal affinity chromatography (“CP-IMAC, as described in U.S. Pat. No. 4,569,794).

[0263] Table 3 below further illustrates examples of IL2R binding proteins described herein that comprise an anti-IL2Rβ V_{H}H antibody at the N-terminus and an anti-IL2Rγ V_{H}H antibody at the C-terminus. In some embodiments, an IL2R binding protein comprises the V_{H}H sequence of DR214, the V_{H}H sequence of DR233, and has at least 90% (e.g., 90%, 91%, 92%, 93%, 94%, 95%, 96%, 97%, 98%, 99%, or 100%) identity to the sequence of SEQ ID NO: 65, optionally without the terminal HHHHHHHHH (SEQ ID NO: 127). In some embodiments, an IL2R binding protein comprises the V_{H}H sequence of DR217, the V_{H}H sequence of DR232, and has at least 90% (e.g., 90%, 91%, 92%, 93%, 94%, 95%, 96%, 97%, 98%, 99%, or 100%) identity to the sequence of SEQ ID NO: 66, optionally without the terminal HHHHHH (SEQ ID NO: 127). In some embodiments, an IL2R binding protein comprises the V_{H}H sequence of DR584, the V_{H}H sequence of DR233, and has at least 90% (e.g., 90%, 91%, 92%, 93%, 94%, 95%, 96%, 97%, 98%, 99%, or 100%) identity to the sequence of SEQ ID NO: 67, optionally without the terminal HHHHHH (SEQ ID NO: 127). In some embodiments, an IL2R binding protein comprises the V_{H}H sequence of DR585, the V_{H}H sequence of DR229, and has at least 90% (e.g., 90%, 91%, 92%, 93%, 94%, 95%, 96%, 97%, 98%, 99%, or 100%) identity to the sequence of SEQ ID NO: 68, optionally without the terminal HHHHHHHHH (SEQ ID NO: 127). In some embodiments, an IL2R binding protein comprises the V_{H}H sequence of DR585, the V_{H}H sequence of DR230, and has at least 90% (e.g., 90%, 91%, 92%, 93%, 94%, 95%, 96%, 97%, 98%, 99%, or 100%) identity to the sequence of SEQ ID NO: 69, optionally without the terminal HHHHHH (SEQ ID NO: 127). In some embodiments, an IL2R binding protein comprises the V_{H}H sequence of DR585, the V_{H}H sequence of DR231, and has at 90% (e.g., 90%, 91%, 92%, 93%, 94%, 95%, 96%, 97%, 98%, 99%, or 100%) identity to the sequence of SEQ ID NO: 70, optionally without the terminal HHHHHH (SEQ ID NO: 127). In some embodiments, an IL2R binding protein comprises the V_{H}H sequence of DR585, the V_{H}H sequence of DR232, and has at least 90% (e.g., 90%, 91%, 92%, 93%, 94%, 95%, 96%, 97%, 98%, 99%, or 100%) identity to the sequence of SEQ ID NO: 71, optionally without the terminal HHHHHH (SEQ ID NO: 127). In some embodiments, an IL2R binding protein comprises the V_{H}H sequence of DR585, the V_{H}H sequence of DR233, and has at least 90% (e.g., 90%, 91%, 92%, 93%, 94%, 95%, 96%, 97%, 98%, 99%, or 100%) identity to the sequence of SEQ ID NO: 72, optionally without the terminal HHHHHHHHH (SEQ ID NO: 127). In some embodiments, an IL2R binding protein comprises the V_{H}H sequence of DR585, the V_{H}H sequence of DR234, and has at least 90% (e.g., 90%, 91%, 92%, 93%, 94%, 95%, 96%, 97%, 98%, 99%, or 100%) identity to the sequence of SEQ ID NO: 73, optionally without the terminal HHHHHH (SEQ ID NO: 127). In some embodiments, an IL2R binding protein comprises the V_{H}H sequence of DR586, the V_{H}H sequence of DR229, and has at least 90% (e.g., 90%, 91%, 92%, 93%, 94%, 95%, 96%, 97%, 98%, 99%, or 100%) identity to the sequence of SEQ ID NO: 74, optionally without the terminal HHHHHHHHH (SEQ ID NO: 127). In some embodiments, an IL2R binding protein comprises the V_{H}H sequence of DR586, the V_{H}H sequence of DR231, and has at least 90% (e.g., 90%, 91%, 92%, 93%, 94%, 95%, 96%, 97%, 98%, 99%, or 100%) identity to the sequence of SEQ ID NO: 75, optionally without the terminal HHHHHH (SEQ ID NO: 127). In some embodiments, an IL2R binding protein comprises the V_{H}H sequence of DR588, the V_{H}H sequence of DR231, and has at least 90% (e.g., 90%, 91%, 92%, 93%, 94%, 95%, 96%, 97%, 98%, 99%, or 100%) identity to the sequence of SEQ ID NO: 76, optionally without the terminal HHHHHHHHH (SEQ ID NO: 127). In some embodiments, an IL2R binding protein comprises the V_{H}H sequence of DR589, the V_{H}H sequence of DR229, and has at least 90% (e.g., 90%, 91%, 92%, 93%, 94%, 95%, 96%, 97%, 98%, 99%, or 100%) identity to the sequence of SEQ ID NO: 77, optionally without the terminal HHHHHH (SEQ ID NO: 127). In some embodiments, an IL2R binding protein comprises the V_{H}H sequence of DR589, the V_{H}H sequence of DR230, and has at least 90% (e.g., 90%, 91%, 92%, 93%, 94%, 95%, 96%, 97%, 98%, 99%, or 100%) identity to the sequence of SEQ ID NO: 78, optionally without the terminal HHHHHHHHH (SEQ ID NO: 127). In some embodiments, an IL2R binding protein comprises the V_{H}H sequence of DR589, the V_{H}H sequence of DR233, and has at least 90% (e.g., 90%, 91%, 92%, 93%, 94%, 95%, 96%, 97%, 98%, 99%, or 100%) identity to the sequence of SEQ ID NO: 79, optionally without the terminal HHHHHH (SEQ ID NO: 127). In some embodiments, an IL2R binding protein comprises the V_{H}H sequence of DR590, the V_{H}H sequence of DR230, and has at least 90% (e.g., 90%, 91%, 92%, 93%, 94%, 95%, 96%, 97%, 98%, 99%, or 100%) identity to the sequence of SEQ ID NO: 80, optionally without the terminal HHHHHH (SEQ ID NO: 127).

TABLE 3
Anti-IL2Rβ/γ V_{H}H² (anti-IL2Rβ V_{H}H-linker-anti-IL2Rγ V_{H}H)

| Anti- | N- | C- | |
|---|---|---|---|
| IL2Rβ/γ | terminal | terminal | |
| V_{H}H² | V_{H}H | V_{H}H | Anti-IL2Rβ/γ V_{H}H² |
| DR696 | DR214 | DR233 | QVQLLESGGGLVQPGGSLRLSCAASGVRIS |
| | | | TQDMSWVRQAPGKGLEWVSSILTPNGSTYY |
| | | | ADSVKGRFTISRDNSKNTLYLQMNSLRAED |
| | | | TAVYYCAGVDERCEAEDQIDYWGQGTLVTV |
| | | | SSGGGSQVQLQESGGGSVQAGGSLRLSCTA |
| | | | SGFTFDDSDMGWYRQAPGNECELVSTISSD |
| | | | GSTYYADSVKGRFTISQDNAKNTVYLQMNS |
| | | | LKPEDTAVYYCAAEPRGYYSNYGGRRECNY |
| | | | WGQGTQVTVSSASHHHHHH |
| | | | (SEQ ID NO: 65) |
| DR701 | DR217 | DR232 | QVQLLESGGGLVQPGGSLRLSCAASGDMII |
| | | | SEDMSWVRQAPGKGLEWVSTIASDDGSTYY |
| | | | ADSVKGRFTISRDNSKNTLYLQMNSLRAED |
| | | | TAVYYCAGFDAQDAAIEYWGQGTLVTVSSG |
| | | | GGSQVQLQESGGGSVQAGGSLRLSCVASGY |
| | | | TSCMGWFRQAPGKEREAVATIYTRGRSIYY |
| | | | ADSVKGRFTISQDNAKNTLYLQMNSLKPED |
| | | | IAMYSCAAGGYSWSAGCEFNYWGQGTQVTV |
| | | | SSASHHHHHH |
| | | | (SEQ ID NO: 66) |
| DR714 | DR584 | DR233 | QVQLQESGGGLVQPGGSLKLSCAASGFRFS |
| | | | NYGMSWVRQAPGEGLEWVSYINGDGSRTHY |
| | | | ADSVKGRFTISRDNAKNTLYLQLNSLKTED |
| | | | TAMYYCEKGLSRDGWSLSAASRGQGTQVTV |
| | | | SSGGGSQVQLQESGGGSVQAGGSLRLSCTA |
| | | | SGFTFDDSDMGWYRQAPGNECELVSTISSD |
| | | | GSTYYADSVKGRFTISQDNAKNTVYLQMNS |
| | | | LKPEDTAVYYCAAEPRGYYSNYGGRRECNY |
| | | | WGQGTQVTVSSASHHHHHH |
| | | | (SEQ ID NO: 67) |
| DR716 | DR585 | DR229 | QVQLQESGGGSVQTGGSLRLSCAVSGYTTY |
| | | | SFNYMGWFRQAPGKEREGVAVIYTGGGSTL |
| | | | YADSVKGRFTISQDNAKNTVYLQMNSLKPE |
| | | | DTAMYYCAADDQRFASPLYAYFGYWGQGTQ |
| | | | VTVSSGGGSQVQLQESGGGLVQPGGSLRLS |
| | | | CTASGFSFSSYPMTWARQAPGKGLEWVSTI |
| | | | ASDGGSTAYAASVEGRFTISRDNAKSTLYL |
| | | | QLNSLKTEDTAMYYCTKGYGDGTPAPGQGT |
| | | | QVTVSSASHHHHHH |
| | | | (SEQ ID NO: 68) |
| DR717 | DR585 | DR230 | QVQLQESGGGSVQTGGSLRLSCAVSGYTTY |
| | | | SFNYMGWFRQAPGKEREGVAVIYTGGGSTL |
| | | | YADSVKGRFTISQDNAKNTVYLQMNSLKPE |
| | | | DTAMYYCAADDQRFASPLYAYFGYWGQGTQ |
| | | | VTVSSGGGSQVQLQESGGGLVQPGGSLRLS |
| | | | CAASGFTFSSAHMSWVRQAPGKGREWIASI |
| | | | YSGGGTFYADSVKGRFTISRDNAKNTLYLQ |
| | | | LNSLKAEDTAMYYCATNRLHYYSDDDSLRG |
| | | | QGTQVTVSSASHHHHHH |
| | | | (SEQ ID NO: 69) |
| DR718 | DR585 | DR231 | QVQLQESGGGSVQTGGSLRLSCAVSGYTTY |
| | | | SFNYMGWFRQAPGKEREGVAVIYTGGGSTL |
| | | | YADSVKGRFTISQDNAKNTVYLQMNSLKPE |
| | | | DTAMYYCAADDQRFASPLYAYFGYWGQGTQ |
| | | | VTVSSGGGSQVQLQESGGGSVQAGGSLRLS |
| | | | CTASGFTFDDREMNWYRQAPGNECELVSTI |
| | | | SSDGSTYYADSVKGRFTISQDNAKNTVYLQ |
| | | | MDSVKPEDTAVYYCAADFMIAIQAPGAGCW |
| | | | GQGTQVTVSSASHHHHHH |
| | | | (SEQ ID NO: 70) |
| DR719 | DR585 | DR232 | QVQLQESGGGSVQTGGSLRLSCAVSGYTTY |
| | | | SFNYMGWFRQAPGKEREGVAVIYTGGGSTL |
| | | | YADSVKGRFTISQDNAKNTVYLQMNSLKPE |
| | | | DTAMYYCAADDQRFASPLYAYFGYWGQGTQ |
| | | | VTVSSGGGSQVQLQESGGGSVQAGGSLRLS |
| | | | CVASGYTSCMGWFRQAPGKEREAVATIYTR |
| | | | GRSIYYADSVKGRFTISQDNAKNTLYLQMN |
| | | | SLKPEDIAMYSCAAGGYSWSAGCEFNYWGQ |
| | | | GTQVTVSSASHHHHHH |
| | | | (SEQ ID NO: 71) |
| DR720 | DR585 | DR233 | QVQLQESGGGSVQTGGSLRLSCAVSGYTTY |
| | | | SFNYMGWFRQAPGKEREGVAVIYTGGGSTL |
| | | | YADSVKGRFTISQDNAKNTVYLQMNSLKPE |
| | | | DTAMYYCAADDQRFASPLYAYFGYWGQGTQ |
| | | | VTVSSGGGSQVQLQESGGGSVQAGGSLRLS |
| | | | CTASGFTFDDSDMGWYRQAPGNECELVSTI |
| | | | SSDGSTYYADSVKGRFTISQDNAKNTVYLQ |
| | | | MNSLKPEDTAVYYCAAEPRGYYSNYGGRRE |
| | | | CNYWGQGTQVTVSSASHHHHHH |
| | | | (SEQ ID NO: 72) |
| DR721 | DR585 | DR234 | QVQLQESGGGSVQTGGSLRLSCAVSGYTTY |
| | | | SFNYMGWFRQAPGKEREGVAVIYTGGGSTL |
| | | | YADSVKGRFTISQDNAKNTVYLQMNSLKPE |
| | | | DTAMYYCAADDQRFASPLYAYFGYWGQGTQ |
| | | | VTVSSGGGSQVQLQESGGGSVQAGGSLRLS |
| | | | CVASGYTFSSYCMGWFRQAPGKEREGVAAL |
| | | | GGGSTYYADSVKGRFTISQDNAKNTLYLQM |
| | | | NSLKPEDTAMYYCAAAWVACLEFGGSWYDL |
| | | | ARYKHWGQGTQVTVSSASHHHHHH |
| | | | (SEQ ID NO: 73) |
| DR722 | DR586 | DR229 | QVQLQESGGGLVQPGGSLRLSCVASGFTFS |
| | | | NYWIFWVRQAAGKGLEWLSTSNTGGDTTKY |
| | | | ADSVKGRFTISRDSAKNTEYLQMNSLKPED |
| | | | TAVYYCETGRCARSGGYQGTQVTVSSGGGS |
| | | | QVQLQESGGGLVQPGGSLRLSCTASGFSFS |
| | | | SYPMTWARQAPGKGLEWVSTIASDGGSTAY |
| | | | AASVEGRFTISRDNAKSTLYLQLNSLKTED |
| | | | TAMYYCTKGYGDGTPAPGQGTQVTVSSASH |
| | | | HHHHH |
| | | | (SEQ ID NO: 74) |
| DR724 | DR586 | DR231 | QVQLQESGGGLVQPGGSLRLSCVASGFTFS |
| | | | NYWIFWVRQAAGKGLEWLSTSNTGGDTTKY |
| | | | ADSVKGRFTISRDSAKNTEYLQMNSLKPED |
| | | | TAVYYCETGRCARSGGYQGTQVTVSSGGGS |
| | | | QVQLQESGGGSVQAGGSLRLSCTASGFTFD |
| | | | DREMNWYRQAPGNECELVSTISSDGSTYYA |
| | | | DSVKGRFTISQDNAKNTVYLQMDSVKPEDT |
| | | | AVYYCAADFMIAIQAPGAGCWGQGTQVTVS |
| | | | SASHHHHHH |
| | | | (SEQ ID |
| | | | NO: 75) |
| DR736 | DR588 | DR231 | QVQLQESGGGSVQVGGSLKLSCAASGYTYS |
| | | | SYYCMGWFRQAPGKEREGVAAIDSDGSTSY |
| | | | ADSVKGRFTISQDDAKNTLYLQMNSLKPED |
| | | | TAMYYCAASYEVVDCYPSGYGQDYWGKGTQ |
| | | | VTVSSGGGSQVQLQESGGGSVQAGGSLRLS |
| | | | CTASGFTFDDREMNWYRQAPGNECELVSTI |
| | | | SSDGSTYYADSVKGRFTISQDNAKNTVYLQ |
| | | | MDSVKPEDTAVYYCAADFMIAIQAPGAGCW |
| | | | GQGTQVTVSSASHHHHHH |
| | | | (SEQ ID NO: 76) |
| DR740 | DR589 | DR229 | QVQLQESGGGSVQAGGSLRLSCAASEYTAS |
| | | | RYCMAWFRQAPGKEREGVAAIHPGGGTTYY |
| | | | ADSVKGRFSISQDSADNTLYLQMNSLKPED |
| | | | TAMYYCAAGSLWVPFGDRCAANYWGQGTQV |
| | | | TVSSGGGSQVQLQESGGGLVQPGGSLRLSC |
| | | | TASGFSFSSYPMTWARQAPGKGLEWVSTIA |
| | | | SDGGSTAYAASVEGRFTISRDNAKSTLYLQ |
| | | | LNSLKTEDTAMYYCTKGYGDGTPAPGQGTQ |
| | | | VTVSSASHHHHHH |
| | | | (SEQ ID NO: 77) |
| DR741 | DR589 | DR230 | QVQLQESGGGSVQAGGSLRLSCAASEYTAS |
| | | | RYCMAWFRQAPGKEREGVAAIHPGGGTTYY |
| | | | ADSVKGRFSISQDSADNTLYLQMNSLKPED |
| | | | TAMYYCAAGSLWVPFGDRCAANYWGQGTQV |
| | | | TVSSGGGSQVQLQESGGGLVQPGGSLRLSC |
| | | | AASGFTFSSAHMSWVRQAPGKGREWIASIY |
| | | | SGGGTFYADSVKGRFTISRDNAKNTLYLQL |
| | | | NSLKAEDTAMYYCATNRLHYYSDDDSLRGQ |
| | | | GTQVTVSSASHHHHHH |
| | | | (SEQ ID NO: 78) |
| DR744 | DR589 | DR233 | QVQLQESGGGSVQAGGSLRLSCAASEYTAS |
| | | | RYCMAWFRQAPGKEREGVAAIHPGGGTTYY |
| | | | ADSVKGRFSISQDSADNTLYLQMNSLKPED |
| | | | TAMYYCAAGSLWVPFGDRCAANYWGQGTQV |
| | | | TVSSGGGSQVQLQESGGGSVQAGGSLRLSC |
| | | | TASGFTFDDSDMGWYRQAPGNECELVSTIS |
| | | | SDGSTYYADSVKGRFTISQDNAKNTVYLQM |
| | | | NSLKPEDTAVYYCAAEPRGYYSNYGGRREC |
| | | | NYWGQGTQVTVSSASHHHHHH |
| | | | (SEQ ID NO: 79) |
| DR747 | DR590 | DR230 | QVQLQESGGGSVQAGGSLRLSCAASGYEYC |
| | | | RIHMTWYRQGPGKEREFVSSIGSDGRKTYA |
| | | | NSVTGRFTISRDNANHTVYLQMNSLSPEDT |
| | | | AMYYCKTEYLYGLGCPDGSAYWGQGTQVTV |
| | | | SSGGGSQVQLQESGGGLVQPGGSLRLSCAA |
| | | | SGFTFSSAHMSWVRQAPGKGREWIASIYSG |
| | | | GGTFYADSVKGRFTISRDNAKNTLYLQLNS |
| | | | LKAEDTAMYYCATNRLHYYSDDDSLRGQGT |
| | | | QVTVSSASHHHHHH |
| | | | (SEQ ID NO: 80) |

[0264] Table 4 below further illustrates examples of IL2R binding proteins described herein that comprise anti-IL2Rγ V_{H}H antibody at the N-terminus and anti-IL2Rβ V_{H}H antibody at the C-terminus.

[0265] In some embodiments, an IL2R binding protein comprises the V_{H}H sequence of DR229, the V_{H}H sequence of DR583, and has at least 90% (e.g., 90%, 91%, 92%, 93%, 94%, 95%, 96%, 97%, 98%, 99%, or 100%) identity to the sequence of SEQ ID NO: 81, optionally without the terminal HHHHHH (SEQ ID NO: 127). In some embodiments, an IL2R binding protein comprises the V_{H}H sequence of DR229, the V_{H}H sequence of DR584, and has at least 90% (e.g., 90%, 91%, 92%, 93%, 94%, 95%, 96%, 97%, 98%, 99%, or 100%) identity to the sequence of SEQ ID NO: 82, optionally without the terminal HHHHHHHHH (SEQ ID NO: 127). In some embodiments, an IL2R binding protein comprises the V_{H}H sequence of DR229, the V_{H}H sequence of DR585, and has at least 90% (e.g., 90%, 91%, 92%, 93%, 94%, 95%, 96%, 97%, 98%, 99%, or 100%) identity to the sequence of SEQ ID NO: 83, optionally without the terminal HHHHHH (SEQ ID NO: 127). In some embodiments, an IL2R binding protein comprises the V_{H}H sequence of DR229, the V_{H}H sequence of DR587, and has at least 90% (e.g., 90%, 91%, 92%, 93%, 94%, 95%, 96%, 97%, 98%, 99%, or 100%) identity to the sequence of SEQ ID NO: 84, optionally without the terminal HHHHHHHHH (SEQ ID NO: 127). In some embodiments, an IL2R binding protein comprises the V_{H}H sequence of DR229, the V_{H}H sequence of DR588, and has at least 90% (e.g., 90%, 91%, 92%, 93%, 94%, 95%, 96%, 97%, 98%, 99%, or 100%) identity to the sequence of SEQ ID NO: 85, optionally without the terminal HHHHHH (SEQ ID NO: 127). In some embodiments, an IL2R binding protein comprises the V_{H}H sequence of DR230, the V_{H}H sequence of DR214, and has at least 90% (e.g., 90%, 91%, 92%, 93%, 94%, 95%, 96%, 97%, 98%, 99%, or 100%) identity to the sequence of SEQ ID NO: 86, optionally without the terminal HHHHHHHHH (SEQ ID NO: 127). In some embodiments, an IL2R binding protein comprises the V_{H}H sequence of DR230, the V_{H}H sequence of DR217, and has at least 90% (e.g., 90%, 91%, 92%, 93%, 94%, 95%, 96%, 97%, 98%, 99%, or 100%) identity to the sequence of SEQ ID NO: 87, optionally without the terminal HHHHHH (SEQ ID NO: 127). In some embodiments, an IL2R binding protein comprises the V_{H}H sequence of DR230, the V_{H}H sequence of DR583, and has at least 90% (e.g., 90%, 91%, 92%, 93%, 94%, 95%, 96%, 97%, 98%, 99%, or 100%) identity to the sequence of SEQ ID NO: 88, optionally without the terminal HHHHHHHHH (SEQ ID NO: 127). In some embodiments, an IL2R binding protein comprises the V_{H}H sequence of DR230, the V_{H}H sequence of DR584, and has at least 90% (e.g., 90%, 91%, 92%, 93%, 94%, 95%, 96%, 97%, 98%, 99%, or 100%) identity to the sequence of SEQ ID NO: 89, optionally without the terminal HHHHHH (SEQ ID NO: 127). In some embodiments, an IL2R binding protein comprises the V_{H}H sequence of DR230, the V_{H}H sequence of DR586, and has at least 90% (e.g., 90%, 91%, 92%, 93%, 94%, 95%, 96%, 97%, 98%, 99%, or 100%) identity to the sequence of SEQ ID NO: 90, optionally without the terminal HHHHHHHHH (SEQ ID NO: 127). In some embodiments, an IL2R binding protein comprises the V_{H}H sequence of DR230, the V_{H}H sequence of DR587, and has at least 90% (e.g., 90%, 91%, 92%, 93%, 94%, 95%, 96%, 97%, 98%, 99%, or 100%) identity to the sequence of SEQ ID NO: 91, optionally without the terminal HHHHHH (SEQ ID NO: 127). In some embodiments, an IL2R binding protein comprises the V_{H}H sequence of DR231, the V_{H}H sequence of DR214, and has at least 90% (e.g., 90%, 91%, 92%, 93%, 94%, 95%, 96%, 97%, 98%, 99%, or 100%) identity to the sequence of SEQ ID NO: 92, optionally without the terminal HHHHHHHHH (SEQ ID NO: 127). In some embodiments, an IL2R binding protein comprises the V_{H}H sequence of DR231, the V_{H}H sequence of DR584, and has at least 90% (e.g., 90%, 91%, 92%, 93%, 94%, 95%, 96%, 97%, 98%, 99%, or 100%) identity to the sequence of SEQ ID NO: 93, optionally without the terminal HHHHHH (SEQ ID NO: 127). In some embodiments, an IL2R binding protein comprises the V_{H}H sequence of DR231, the V_{H}H sequence of DR585, and has at least 90% (e.g., 90%, 91%, 92%, 93%, 94%, 95%, 96%, 97%, 98%, 99%, or 100%) identity to the sequence of SEQ ID NO: 94, optionally without the terminal HHHHHHHHH (SEQ ID NO: 127). In some embodiments, an IL2R binding protein comprises the V_{H}H sequence of DR232, the V_{H}H sequence of DR590, and has at least 90% (e.g., 90%, 91%, 92%, 93%, 94%, 95%, 96%, 97%, 98%, 99%, or 100%) identity to the sequence of SEQ ID NO: 95, optionally without the terminal HHHHHH (SEQ ID NO: 127). In some embodiments, an IL2R binding protein comprises the V_{H}H sequence of DR233, the V_{H}H sequence of DR214, and has at least 90% (e.g., 90%, 91%, 92%, 93%, 94%, 95%, 96%, 97%, 98%, 99%, or 100%) identity to the sequence of SEQ ID NO: 96, optionally without the terminal HHHHHHHHH (SEQ ID NO: 127).

[0266] In some embodiments, an IL2R binding protein comprises the V_{H}H sequence of DR233, the V_{H}H sequence of DR217, and has at least 90% (e.g., 90%, 91%, 92%, 93%, 94%, 95%, 96%, 97%, 98%, 99%, or 100%) identity to the sequence of SEQ ID NO: 97, optionally without the terminal HHHHHH (SEQ ID NO: 127). In some embodiments, an IL2R binding protein comprises the V_{H}H sequence of DR233, the V_{H}H sequence of DR583, and has at least 90% (e.g., 90%, 91%, 92%, 93%, 94%, 95%, 96%, 97%, 98%, 99%, or 100%) identity to the sequence of SEQ ID NO: 98, optionally without the terminal HHHHHHHHH (SEQ ID NO: 127). In some embodiments, an IL2R binding protein comprises the V_{H}H sequence of DR233, the V_{H}H sequence of DR584, and has at least 90% (e.g., 90%, 91%, 92%, 93%, 94%, 95%, 96%, 97%, 98%, 99%, or 100%) identity to the sequence of SEQ ID NO: 99, optionally without the terminal HHHHHH (SEQ ID NO: 127). In some embodiments, an IL2R binding protein comprises the V_{H}H sequence of DR233, the V_{H}H sequence of DR585, and has at least 90% (e.g., 90%, 91%, 92%, 93%, 94%, 95%, 96%, 97%, 98%, 99%, or 100%) identity to the sequence of SEQ ID NO: 100, optionally without the terminal HHHHHH (SEQ ID NO: 127). In some embodiments, an IL2R binding protein comprises the V_{H}H sequence of DR233, the V_{H}H sequence of DR587, and has at least 90% (e.g., 90%, 91%, 92%, 93%, 94%, 95%, 96%, 97%, 98%, 99%, or 100%) identity to the sequence of SEQ ID NO: 101, optionally without the terminal HHHHHH (SEQ ID NO: 127). In some embodiments, an IL2R binding protein comprises the V_{H}H sequence of DR233, the V_{H}H sequence of DR588, and has at least 90% (e.g., 90%, 91%, 92%, 93%, 94%, 95%, 96%, 97%, 98%, 99%, or 100%) identity to the sequence of SEQ ID NO: 102, optionally without the terminal HHHHHH (SEQ ID NO: 127). In some embodiments, an IL2R binding protein comprises the V_{H}H sequence of DR233, the V_{H}H sequence of DR589, and has at least 90% (e.g., 90%, 91%, 92%, 93%, 94%, 95%, 96%, 97%, 98%, 99%, or 100%) identity to the sequence of SEQ ID NO: 103, optionally without the terminal HHHHHH (SEQ ID NO: 127). In some embodiments, an IL2R binding protein comprises the V_{H}H sequence of DR233, the V_{H}H sequence of DR590, and has at least 90% (e.g., 90%, 91%, 92%, 93%, 94%, 95%, 96%, 97%, 98%, 99%, or 100%) identity to the sequence of SEQ ID NO: 104, optionally without the terminal HHHHHH (SEQ ID NO: 127). In some embodiments, an IL2R binding protein comprises the V_{H}H sequence of DR234, the V_{H}H sequence of DR214, and has at least 90% (e.g., 90%, 91%, 92%, 93%, 94%, 95%, 96%, 97%, 98%, 99%, or 100%) identity to the sequence of SEQ ID NO: 105, optionally without the terminal HHHHHH (SEQ ID NO: 127). In some embodiments, an IL2R binding protein comprises the V_{H}H sequence of DR234, the V_{H}H sequence of DR587, and has at least 90% (e.g., 90%, 91%, 92%, 93%, 94%, 95%, 96%, 97%, 98%, 99%, or 100%) identity to the sequence of SEQ ID NO: 106, optionally without the terminal HHHHHH (SEQ ID NO: 127).

TABLE 4
Anti-IL2Rβ/γ V_{H}H² (anti-IL2Rγ V_{H}H-linker-anti-IL2Rβ V_{H}H)

| Anti- | N- | C- | |
|---|---|---|---|
| IL2Rβ/γ | terminal | terminal | |
| V_{H}H² | V_{H}H | V_{H}H | Anti-IL2Rβ/γ V_{H}H² |
| DR634 | DR229 | DR583 | QVQLQESGGGLVQPGGSLRLSCTASGFSFSSYPMTWA |
| | | | RQAPGKGLEWVSTIASDGGSTAYAASVEGRFTISRDN |
| | | | AKSTLYLQLNSLKTEDTAMYYCTKGYGDGTPAPGQG |
| | | | TQVTVSSGGGSQVQLQESGGGSVQAGGSLRLSCVGSG |
| | | | YTYDTSDMSWYRQAPGKEREFVSDIDSGDWAAYADA |
| | | | VKGRFTISRDNAKKTVYLQMNSLEPEDTAMYYCKAS |
| | | | YWKWGKLNNFWGPGTQVTVSSASHHHHHH |
| | | | (SEQ ID NO: 81) |
| DR635 | DR229 | DR584 | QVQLQESGGGLVQPGGSLRLSCTASGFSFSSYPMTWA |
| | | | RQAPGKGLEWVSTIASDGGSTAYAASVEGRFTISRDN |
| | | | AKSTLYLQLNSLKTEDTAMYYCTKGYGDGTPAPGQG |
| | | | TQVTVSSGGGSQVQLQESGGGLVQPGGSLKLSCAASG |
| | | | FRFSNYGMSWVRQAPGEGLEWVSYINGDGSRTHYAD |
| | | | SVKGRFTISRDNAKNTLYLQLNSLKTEDTAMYYCEKG |
| | | | LSRDGWSLSAASRGQGTQVTVSSASHHHHHH |
| | | | (SEQ ID NO: 82) |
| DR636 | DR229 | DR585 | QVQLQESGGGLVQPGGSLRLSCTASGFSFSSYPMTWA |
| | | | RQAPGKGLEWVSTIASDGGSTAYAASVEGRFTISRDN |
| | | | AKSTLYLQLNSLKTEDTAMYYCTKGYGDGTPAPGQG |
| | | | TQVTVSSGGGSQVQLQESGGGSVQTGGSLRLSCAVSG |
| | | | YTTYSFNYMGWFRQAPGKEREGVAVIYTGGGSTLYA |
| | | | DSVKGRFTISQDNAKNTVYLQMNSLKPEDTAMYYCA |
| | | | ADDQRFASPLYAYFGYWGQGTQVTVSSASHHHHHH |
| | | | (SEQ ID NO: 83) |
| DR638 | DR229 | DR587 | QVQLQESGGGLVQPGGSLRLSCTASGFSFSSYPMTWA |
| | | | RQAPGKGLEWVSTIASDGGSTAYAASVEGRFTISRDN |
| | | | AKSTLYLQLNSLKTEDTAMYYCTKGYGDGTPAPGQG |
| | | | TQVTVSSGGGSQVQLQESGGGSVQVGGSLRLSCATSG |
| | | | DTKSIRCMGWFRQTPGKEREGIAAIDREGFATYADSV |
| | | | YDRFTIAQDNAQNTLYLEMNALKPEDTAMYYCAAQN |
| | | | MCRVVRGAMTGVDYWGKGTQVTVSSASHHHHHH |
| | | | (SEQ ID NO: 84) |
| DR639 | DR229 | DR588 | QVQLQESGGGLVQPGGSLRLSCTASGFSFSSYPMTWA |
| | | | RQAPGKGLEWVSTIASDGGSTAYAASVEGRFTISRDN |
| | | | AKSTLYLQLNSLKTEDTAMYYCTKGYGDGTPAPGQG |
| | | | TQVTVSSGGGSQVQLQESGGGSVQVGGSLKLSCAASG |
| | | | YTYSSYYCMGWFRQAPGKEREGVAAIDSDGSTSYADS |
| | | | VKGRFTISQDDAKNTLYLQMNSLKPEDTAMYYCAAS |
| | | | YEVVDCYPSGYGQDYWGKGTQVTVSSASHHHHHH |
| | | | (SEQ ID NO: 85) |
| DR642 | DR230 | DR214 | QVQLQESGGGLVQPGGSLRLSCAASGFTFSSAHMSWV |
| | | | RQAPGKGREWIASIYSGGGTFYADSVKGRFTISRDNAK |
| | | | NTLYLQLNSLKAEDTAMYYCATNRLHYYSDDDSLRG |
| | | | QGTQVTVSSGGGSQVQLLESGGGLVQPGGSLRLSCAA |
| | | | SGVRISTQDMSWVRQAPGKGLEWVSSILTPNGSTYYA |
| | | | DSVKGRFTISRDNSKNTLYLQMNSLRAEDTAVYYCAG |
| | | | VDERCEAEDQIDYWGQGTLVTVSSASHHHHHH |
| | | | (SEQ ID NO: 86) |
| DR643 | DR230 | DR217 | QVQLQESGGGLVQPGGSLRLSCAASGFTFSSAHMSWV |
| | | | RQAPGKGREWIASIYSGGGTFYADSVKGRFTISRDNAK |
| | | | NTLYLQLNSLKAEDTAMYYCATNRLHYYSDDDSLRG |
| | | | QGTQVTVSSGGGSQVQLLESGGGLVQPGGSLRLSCAA |
| | | | SGDMIISEDMSWVRQAPGKGLEWVSTIASDDGSTYYA |
| | | | DSVKGRFTISRDNSKNTLYLQMNSLRAEDTAVYYCAG |
| | | | FDAQDAAIEYWGQGTLVTVSSASHHHHHH |
| | | | (SEQ ID NO: 87) |
| DR644 | DR230 | DR583 | QVQLQESGGGLVQPGGSLRLSCAASGFTFSSAHMSWV |
| | | | RQAPGKGREWIASIYSGGGTFYADSVKGRFTISRDNAK |
| | | | NTLYLQLNSLKAEDTAMYYCATNRLHYYSDDDSLRG |
| | | | QGTQVTVSSGGGSQVQLQESGGGSVQAGGSLRLSCVG |
| | | | SGYTYDTSDMSWYRQAPGKEREFVSDIDSGDWAAYA |
| | | | DAVKGRFTISRDNAKKTVYLQMNSLEPEDTAMYYCK |
| | | | ASYWKWGKLNNFWGPGTQVTVSSASHHHHHH |
| | | | (SEQ ID NO: 88) |
| DR645 | DR230 | DR584 | QVQLQESGGGLVQPGGSLRLSCAASGFTFSSAHMSWV |
| | | | RQAPGKGREWIASIYSGGGTFYADSVKGRFTISRDNAK |
| | | | NTLYLQLNSLKAEDTAMYYCATNRLHYYSDDDSLRG |
| | | | QGTQVTVSSGGGSQVQLQESGGGLVQPGGSLKLSCAA |
| | | | SGFRFSNYGMSWVRQAPGEGLEWVSYINGDGSRTHY |
| | | | ADSVKGRFTISRDNAKNTLYLQLNSLKTEDTAMYYCE |
| | | | KGLSRDGWSLSAASRGQGTQVTVSSASHHHHHH |
| | | | (SEQ ID NO: 89) |
| DR647 | DR230 | DR586 | QVQLQESGGGLVQPGGSLRLSCAASGFTFSSAHMSWV |
| | | | RQAPGKGREWIASIYSGGGTFYADSVKGRFTISRDNAK |
| | | | NTLYLQLNSLKAEDTAMYYCATNRLHYYSDDDSLRG |
| | | | QGTQVTVSSGGGSQVQLQESGGGLVQPGGSLRLSCVA |
| | | | SGFTFSNYWIFWVRQAAGKGLEWLSTSNTGGDTTKY |
| | | | ADSVKGRFTISRDSAKNTEYLQMNSLKPEDTAVYYCE |
| | | | TGRCARSGGYQGTQVTVSSASHHHHHH |
| | | | (SEQ ID NO: 90) |
| DR648 | DR230 | DR587 | QVQLQESGGGLVQPGGSLRLSCAASGFTFSSAHMSWV |
| | | | RQAPGKGREWIASIYSGGGTFYADSVKGRFTISRDNAK |
| | | | NTLYLQLNSLKAEDTAMYYCATNRLHYYSDDDSLRG |
| | | | QGTQVTVSSGGGSQVQLQESGGGSVQVGGSLRLSCAT |
| | | | SGDTKSIRCMGWFRQTPGKEREGIAAIDREGFATYADS |
| | | | VYDRFTIAQDNAQNTLYLEMNALKPEDTAMYYCAAQ |
| | | | NMCRVVRGAMTGVDYWGKGTQVTVSSASHHHHHH |
| | | | (SEQ ID NO: 91) |
| DR652 | DR231 | DR214 | QVQLQESGGGSVQAGGSLRLSCTASGFTFDDREMNW |
| | | | YRQAPGNECELVSTISSDGSTYYADSVKGRFTISQDNA |
| | | | KNTVYLQMDSVKPEDTAVYYCAADFMIAIQAPGAGC |
| | | | WGQGTQVTVSSGGGSQVQLLESGGGLVQPGGSLRLSC |
| | | | AASGVRISTQDMSWVRQAPGKGLEWVSSILTPNGSTY |
| | | | YADSVKGRFTISRDNSKNTLYLQMNSLRAEDTAVYYC |
| | | | AGVDERCEAEDQIDYWGQGTLVTVSSASHHHHHH |
| | | | (SEQ ID NO: 92) |
| DR655 | DR231 | DR584 | QVQLQESGGGSVQAGGSLRLSCTASGFTFDDREMNW |
| | | | YRQAPGNECELVSTISSDGSTYYADSVKGRFTISQDNA |
| | | | KNTVYLQMDSVKPEDTAVYYCAADFMIAIQAPGAGC |
| | | | WGQGTQVTVSSGGGSQVQLQESGGGLVQPGGSLKLS |
| | | | CAASGFRFSNYGMSWVRQAPGEGLEWVSYINGDGSR |
| | | | THYADSVKGRFTISRDNAKNTLYLQLNSLKTEDTAMY |
| | | | YCEKGLSRDGWSLSAASRGQGTQVTVSSASHHHHHH |
| | | | (SEQ ID NO: 93) |
| DR656 | DR231 | DR585 | QVQLQESGGGSVQAGGSLRLSCTASGFTFDDREMNW |
| | | | YRQAPGNECELVSTISSDGSTYYADSVKGRFTISQDNA |
| | | | KNTVYLQMDSVKPEDTAVYYCAADFMIAIQAPGAGC |
| | | | WGQGTQVTVSSGGGSQVQLQESGGGSVQTGGSLRLS |
| | | | CAVSGYTTYSFNYMGWFRQAPGKEREGVAVIYTGGG |
| | | | STLYADSVKGRFTISQDNAKNTVYLQMNSLKPEDTAM |
| | | | YYCAADDQRFASPLYAYFGYWGQGTQVTVSSASHHH |
| | | | HHH (SEQ ID NO: 94) |
| DR671 | DR232 | DR590 | QVQLQESGGGSVQAGGSLRLSCVASGYTSCMGWFRQ |
| | | | APGKEREAVATIYTRGRSIYYADSVKGRFTISQDNAKN |
| | | | TLYLQMNSLKPEDIAMYSCAAGGYSWSAGCEFNYWG |
| | | | QGTQVTVSSGGGSQVQLQESGGGSVQAGGSLRLSCAA |
| | | | SGYEYCRIHMTWYRQGPGKEREFVSSIGSDGRKTYAN |
| | | | SVTGRFTISRDNANHTVYLQMNSLSPEDTAMYYCKTE |
| | | | YLYGLGCPDGSAYWGQGTQVTVSSASHHHHHH |
| | | | (SEQ ID NO: 95) |
| DR672 | DR233 | DR214 | QVQLQESGGGSVQAGGSLRLSCTASGFTFDDSDMGW |
| | | | YRQAPGNECELVSTISSDGSTYYADSVKGRFTISQDNA |
| | | | KNTVYLQMNSLKPEDTAVYYCAAEPRGYYSNYGGRR |
| | | | ECNYWGQGTQVTVSSGGGSQVQLLESGGGLVQPGGS |
| | | | LRLSCAASGVRISTQDMSWVRQAPGKGLEWVSSILTP |
| | | | NGSTYYADSVKGRFTISRDNSKNTLYLQMNSLRAEDT |
| | | | AVYYCAGVDERCEAEDQIDYWGQGTLVTVSSASHHH |
| | | | HHH (SEQ ID NO: 96) |
| DR673 | DR233 | DR217 | QVQLQESGGGSVQAGGSLRLSCTASGFTFDDSDMGW |
| | | | YRQAPGNECELVSTISSDGSTYYADSVKGRFTISQDNA |
| | | | KNTVYLQMNSLKPEDTAVYYCAAEPRGYYSNYGGRR |
| | | | ECNYWGQGTQVTVSSGGGSQVQLLESGGGLVQPGGS |
| | | | LRLSCAASGDMIISEDMSWVRQAPGKGLEWVSTIASD |
| | | | DGSTYYADSVKGRFTISRDNSKNTLYLQMNSLRAEDT |
| | | | AVYYCAGFDAQDAAIEYWGQGTLVTVSSASHHHHHH |
| | | | (SEQ ID NO: 97) |
| DR674 | DR233 | DR583 | QVQLQESGGGSVQAGGSLRLSCTASGFTFDDSDMGW |
| | | | YRQAPGNECELVSTISSDGSTYYADSVKGRFTISQDNA |
| | | | KNTVYLQMNSLKPEDTAVYYCAAEPRGYYSNYGGRR |
| | | | ECNYWGQGTQVTVSSGGGSQVQLQESGGGSVQAGGS |
| | | | LRLSCVGSGYTYDTSDMSWYRQAPGKEREFVSDIDSG |
| | | | DWAAYADAVKGRFTISRDNAKKTVYLQMNSLEPEDT |
| | | | AMYYCKASYWKWGKLNNFWGPGTQVTVSSASHHHH |
| | | | HH (SEQ ID NO: 98) |
| DR675 | DR233 | DR584 | QVQLQESGGGSVQAGGSLRLSCTASGFTFDDSDMGW |
| | | | YRQAPGNECELVSTISSDGSTYYADSVKGRFTISQDNA |
| | | | KNTVYLQMNSLKPEDTAVYYCAAEPRGYYSNYGGRR |
| | | | ECNYWGQGTQVTVSSGGGSQVQLQESGGGLVQPGGS |
| | | | LKLSCAASGFRFSNYGMSWVRQAPGEGLEWVSYING |
| | | | DGSRTHYADSVKGRFTISRDNAKNTLYLQLNSLKTED |
| | | | TAMYYCEKGLSRDGWSLSAASRGQGTQVTVSSASHH |
| | | | HHHH (SEQ ID NO: 99) |
| DR676 | DR233 | DR585 | QVQLQESGGGSVQAGGSLRLSCTASGFTFDDSDMGW |
| | | | YRQAPGNECELVSTISSDGSTYYADSVKGRFTISQDNA |
| | | | KNTVYLQMNSLKPEDTAVYYCAAEPRGYYSNYGGRR |
| | | | ECNYWGQGTQVTVSSGGGSQVQLQESGGGSVQTGGS |
| | | | LRLSCAVSGYTTYSFNYMGWFRQAPGKEREGVAVIYT |
| | | | GGGSTLYADSVKGRFTISQDNAKNTVYLQMNSLKPED |
| | | | TAMYYCAADDQRFASPLYAYFGYWGQGTQVTVSSAS |
| | | | HHHHHH (SEQ ID NO: 100) |
| DR678 | DR233 | DR587 | QVQLQESGGGSVQAGGSLRLSCTASGFTFDDSDMGW |
| | | | YRQAPGNECELVSTISSDGSTYYADSVKGRFTISQDNA |
| | | | KNTVYLQMNSLKPEDTAVYYCAAEPRGYYSNYGGRR |
| | | | ECNYWGQGTQVTVSSGGGSQVQLQESGGGSVQVGGS |
| | | | LRLSCATSGDTKSIRCMGWFRQTPGKEREGIAAIDREG |
| | | | FATYADSVYDRFTIAQDNAQNTLYLEMNALKPEDTA |
| | | | MYYCAAQNMCRVVRGAMTGVDYWGKGTQVTVSSA |
| | | | SHHHHHH (SEQ ID NO: 101) |
| DR679 | DR233 | DR588 | QVQLQESGGGSVQAGGSLRLSCTASGFTFDDSDMGW |
| | | | YRQAPGNECELVSTISSDGSTYYADSVKGRFTISQDNA |
| | | | KNTVYLQMNSLKPEDTAVYYCAAEPRGYYSNYGGRR |
| | | | ECNYWGQGTQVTVSSGGGSQVQLQESGGGSVQVGGS |
| | | | LKLSCAASGYTYSSYYCMGWFRQAPGKEREGVAAIDS |
| | | | DGSTSYADSVKGRFTISQDDAKNTLYLQMNSLKPEDT |
| | | | AMYYCAASYEVVDCYPSGYGQDYWGKGTQVTVSSA |
| | | | SHHHHHH (SEQ ID NO: 102) |
| DR680 | DR233 | DR589 | QVQLQESGGGSVQAGGSLRLSCTASGFTFDDSDMGW |
| | | | YRQAPGNECELVSTISSDGSTYYADSVKGRFTISQDNA |
| | | | KNTVYLQMNSLKPEDTAVYYCAAEPRGYYSNYGGRR |
| | | | ECNYWGQGTQVTVSSGGGSQVQLQESGGGSVQAGGS |
| | | | LRLSCAASEYTASRYCMAWFRQAPGKEREGVAAIHPG |
| | | | GGTTYYADSVKGRFSISQDSADNTLYLQMNSLKPEDT |
| | | | AMYYCAAGSLWVPFGDRCAANYWGQGTQVTVSSAS |
| | | | HHHHHH (SEQ ID NO: 103) |
| DR681 | DR233 | DR590 | QVQLQESGGGSVQAGGSLRLSCTASGFTFDDSDMGW |
| | | | YRQAPGNECELVSTISSDGSTYYADSVKGRFTISQDNA |
| | | | KNTVYLQMNSLKPEDTAVYYCAAEPRGYYSNYGGRR |
| | | | ECNYWGQGTQVTVSSGGGSQVQLQESGGGSVQAGGS |
| | | | LRLSCAASGYEYCRIHMTWYRQGPGKEREFVSSIGSD |
| | | | GRKTYANSVTGRFTISRDNANHTVYLQMNSLSPEDTA |
| | | | MYYCKTEYLYGLGCPDGSAYWGQGTQVTVSSASHHH |
| | | | HHH (SEQ ID NO: 104) |
| DR682 | DR234 | DR214 | QVQLQESGGGSVQAGGSLRLSCVASGYTFSSYCMGW |
| | | | FRQAPGKEREGVAALGGGSTYYADSVKGRFTISQDNA |
| | | | KNTLYLQMNSLKPEDTAMYYCAAAWVACLEFGGSW |
| | | | YDLARYKHWGQGTQVTVSSGGGSQVQLLESGGGLVQ |
| | | | PGGSLRLSCAASGVRISTQDMSWVRQAPGKGLEWVSS |
| | | | ILTPNGSTYYADSVKGRFTISRDNSKNTLYLQMNSLRA |
| | | | EDTAVYYCAGVDERCEAEDQIDYWGQGTLVTVSSAS |
| | | | HHHHHH (SEQ ID NO: 105) |
| DR688 | DR234 | DR587 | QVQLQESGGGSVQAGGSLRLSCVASGYTFSSYCMGW |
| | | | FRQAPGKEREGVAALGGGSTYYADSVKGRFTISQDNA |
| | | | KNTLYLQMNSLKPEDTAMYYCAAAWVACLEFGGSW |
| | | | YDLARYKHWGQGTQVTVSSGGGSQVQLQESGGGSVQ |
| | | | VGGSLRLSCATSGDTKSIRCMGWFRQTPGKEREGIAAI |
| | | | DREGFATYADSVYDRFTIAQDNAQNTLYLEMNALKPE |
| | | | DTAMYYCAAQNMCRVVRGAMTGVDYWGKGTQVTV |
| | | | SSASHHHHHH (SEQ ID NO: 106) |

[0267] As shown in the illustrative examples of IL2R binding proteins of Table 3 and Table 4, the IL2R binding protein sequences listed therein contain GGGS (SEQ ID NO: 107) as a linker. In some embodiments, the GGGS (SEQ ID NO: 107) can be replaced by other linkers as described further herein. Furthermore, the IL2R binding protein sequences shown in Table 3 and Table 4 may be operably linked to a chelating peptide such as the “ASH6” (SEQ ID NO: 126) metal chelating peptide which may be used to facilitate purification via metal affinity chromatography. In some embodiments, this purification handle can be removed or replaced by other purification handles (e.g., H6 (SEQ ID NO: 127)).

[0268] Further, in each of SEQ ID NOS: 170-289 below, each title of the sequence follows the formula “anti-IL2Rβ/IL2Rγ V_{H}H² (V_{H}H antibody at the N-terminus—V_{H}H antibody at the C-terminus).” For example, “DR632(DR229-DR214)” refers to the anti-IL2Rβ/IL2Rγ V_{H}H² binding protein with DR229 V_{H}H at the N-terminus and DR214 V_{H}H antibody at the C-terminus. In each of SEQ ID NOS: 170-289 below, the linker is in bold, and each of CDR1, CDR2, CDR3 of the N-terminal V_{H}H antibody and CDR1, CDR2, CDR3 of the C-terminal V_{H}H antibody is underlined, respectively. An IL2Rβ/IL2Rγ binding protein described herein can comprise the V_{H}H sequence of the N-terminal V_{H}H antibody, the V_{H}H sequence of the C-terminal V_{H}H antibody, and has at least 90% (e.g., 90%, 91%, 92%, 93%, 94%, 95%, 96%, 97%, 98%, 99%, or 100%) identity to a sequence of any one of SEQ ID NOS: 170-289, optionally without the terminal HHHHHH (SEQ ID NO: 127). Moreover, the GGGS (SEQ ID NO: 107) in each of SEQ ID NOS: 170-289 below can be replaced by other linkers as described further herein. The purification handle “ASH₆” (SEQ ID NO: 126) at the end of each of SEQ ID NOS: 170-289 can be removed or replaced by other purification handles (e.g., H₆ (SEQ ID NO: 127)).

> SEQ ID NO: 170; DR632(DR229-DR214)
QVQLQESGGGLVQPGGSLRLSCTASGFSFSSYPMTWARQAPGKGLEWVS
TIASDGGSTAYAASVEGRFTISRDNAKSTLYLQLNSLKTEDTAMYYCTK
GYGDGTPAPGQGTQVTVSSGGGSQVQLLESGGGLVQPGGSLRLSCAASG
VRISTQDMSWVRQAPGKGLEWVSSILTPNGSTYYADSVKGRFTISRDNS
KNTLYLQMNSLRAEDTAVYYCAGVDERCEAEDQIDYWGQGTLVTVSSAS
HHHHHH
> SEQ ID NO: 171; DR633(DR229-DR217)
QVQLQESGGGLVQPGGSLRLSCTASGFSFSSYPMTWARQAPGKGLEWVS
TIASDGGSTAYAASVEGRFTISRDNAKSTLYLQLNSLKTEDTAMYYCTK
GYGDGTPAPGQGTQVTVSSGGGSQVQLLESGGGLVQPGGSLRLSCAASG
DMIISEDMSWVRQAPGKGLEWVSTIASDDGSTYYADSVKGRFTISRDNS
KNTLYLQMNSLRAEDTAVYYCAGFDAQDAAIEYWGQGTLVTVSSASHHH
HHH
> SEQ ID NO: 172; DR634(DR229-DR583)
QVQLQESGGGLVQPGGSLRLSCTASGFSFSSYPMTWARQAPGKGLEWVS
TIASDGGSTAYAASVEGRFTISRDNAKSTLYLQLNSLKTEDTAMYYCTK
GYGDGTPAPGQGTQVTVSSGGGSQVQLQESGGGSVQAGGSLRLSCVGSG
YTYDTSDMSWYRQAPGKEREFVSDIDSGDWAAYADAVKGRFTISRDNAK
KTVYLQMNSLEPEDTAMYYCKASYWKWGKLNNFWGPGTQVTVSSASHHH
HHH
> SEQ ID NO: 173; DR635(DR229-DR584)
QVQLQESGGGLVQPGGSLRLSCTASGFSFSSYPMTWARQAPGKGLEWVS
TIASDGGSTAYAASVEGRFTISRDNAKSTLYLQLNSLKTEDTAMYYCTK
GYGDGTPAPGQGTQVTVSSGGGSQVQLQESGGGLVQPGGSLKLSCAASG
FRFSNYGMSWVRQAPGEGLEWVSYINGDGSRTHYADSVKGRFTISRDNA
KNTLYLQLNSLKTEDTAMYYCEKGLSRDGWSLSAASRGQGTQVTVSSAS
HHHHHH
> SEQ ID NO: 174; DR636(DR229-DR585)
QVQLQESGGGLVQPGGSLRLSCTASGFSFSSYPMTWARQAPGKGLEWVS
TIASDGGSTAYAASVEGRFTISRDNAKSTLYLQLNSLKTEDTAMYYCTK
GYGDGTPAPGQGTQVTVSSGGGSQVQLQESGGGSVQTGGSLRLSCAVSG
YTTYSFNYMGWFRQAPGKEREGVAVIYTGGGSTLYADSVKGRFTISQDN
AKNTVYLQMNSLKPEDTAMYYCAADDQRFASPLYAYFGYWGQGTQVTVS
SASHHHHHH
> SEQ ID NO: 175; DR637(DR229-DR586)
QVQLQESGGGLVQPGGSLRLSCTASGFSFSSYPMTWARQAPGKGLEWVS
TIASDGGSTAYAASVEGRFTISRDNAKSTLYLQLNSLKTEDTAMYYCTK
GYGDGTPAPGQGTQVTVSSGGGSQVQLQESGGGLVQPGGSLRLSCVASG
FTFSNYWIFWVRQAAGKGLEWLSTSNTGGDTTKYADSVKGRFTISRDSA
KNTEYLQMNSLKPEDTAVYYCETGRCARSGGYQGTQVTVSSASHHHHHH
> SEQ ID NO: 176; DR638(DR229-DR587)
QVQLQESGGGLVQPGGSLRLSCTASGFSFSSYPMTWARQAPGKGLEWVS
TIASDGGSTAYAASVEGRFTISRDNAKSTLYLQLNSLKTEDTAMYYCTK
GYGDGTPAPGQGTQVTVSSGGGSQVQLQESGGGSVQVGGSLRLSCATSG
DTKSIRCMGWFRQTPGKEREGIAAIDREGFATYADSVYDRFTIAQDNAQ
NTLYLEMNALKPEDTAMYYCAAQNMCRVVRGAMTGVDYWGKGTQVTVSS
ASHHHHHH
> SEQ ID NO: 177; DR639(DR229-DR588)
QVQLQESGGGLVQPGGSLRLSCTASGFSFSSYPMTWARQAPGKGLEWVS
TIASDGGSTAYAASVEGRFTISRDNAKSTLYLQLNSLKTEDTAMYYCTK
GYGDGTPAPGQGTQVTVSSGGGSQVQLQESGGGSVQVGGSLKLSCAASG
YTYSSYYCMGWFRQAPGKEREGVAAIDSDGSTSYADSVKGRFTISQDDA
KNTLYLQMNSLKPEDTAMYYCAASYEVVDCYPSGYGQDYWGKGTQVTVS
SASHHHHHH
> SEQ ID NO: 178; DR640(DR229-DR589)
QVQLQESGGGLVQPGGSLRLSCTASGFSFSSYPMTWARQAPGKGLEWVS
TIASDGGSTAYAASVEGRFTISRDNAKSTLYLQLNSLKTEDTAMYYCTK
GYGDGTPAPGQGTQVTVSSGGGSQVQLQESGGGSVQAGGSLRLSCAASE
YTASRYCMAWFRQAPGKEREGVAAIHPGGGTTYYADSVKGRFSISQDSA
DNTLYLQMNSLKPEDTAMYYCAAGSLWVPFGDRCAANYWGQGTQVTVSS
ASHHHHHH
> SEQ ID NO: 179; DR641(DR229-DR590)
QVQLQESGGGLVQPGGSLRLSCTASGFSFSSYPMTWARQAPGKGLEWVS
TIASDGGSTAYAASVEGRFTISRDNAKSTLYLQLNSLKTEDTAMYYCTK
GYGDGTPAPGQGTQVTVSSGGGSQVQLQESGGGSVQAGGSLRLSCAASG
YEYCRIHMTWYRQGPGKEREFVSSIGSDGRKTYANSVTGRFTISRDNAN
HTVYLQMNSLSPEDTAMYYCKTEYLYGLGCPDGSAYWGQGTQVTVSSAS
HHHHHH
> SEQ ID NO: 180; DR642(DR230-DR214)
QVQLQESGGGLVQPGGSLRLSCAASGFTFSSAHMSWVRQAPGKGREWIA
SIYSGGGTFYADSVKGRFTISRDNAKNTLYLQLNSLKAEDTAMYYCATN
RLHYYSDDDSLRGQGTQVTVSSGGGSQVQLLESGGGLVQPGGSLRLSCA
ASGVRISTQDMSWVRQAPGKGLEWVSSILTPNGSTYYADSVKGRFTISR
DNSKNTLYLQMNSLRAEDTAVYYCAGVDERCEAEDQIDYWGQGTLVTVS
SASHHHHHH
> SEQ ID NO: 181; DR643(DR230-DR217)
QVQLQESGGGLVQPGGSLRLSCAASGFTFSSAHMSWVRQAPGKGREWIA
SIYSGGGTFYADSVKGRFTISRDNAKNTLYLQLNSLKAEDTAMYYCATN
RLHYYSDDDSLRGQGTQVTVSSGGGSQVQLLESGGGLVQPGGSLRLSCA
ASGDMIISEDMSWVRQAPGKGLEWVSTIASDDGSTYYADSVKGRFTISR
DNSKNTLYLQMNSLRAEDTAVYYCAGFDAQDAAIEYWGQGTLVTVSSAS
HHHHHH
> SEQ ID NO: 182; DR644(DR230-DR583)
QVQLQESGGGLVQPGGSLRLSCAASGFTFSSAHMSWVRQAPGKGREWIA
SIYSGGGTFYADSVKGRFTISRDNAKNTLYLQLNSLKAEDTAMYYCATN
RLHYYSDDDSLRGQGTQVTVSSGGGSQVQLQESGGGSVQAGGSLRLSCV
GSGYTYDTSDMSWYRQAPGKEREFVSDIDSGDWAAYADAVKGRFTISRD
NAKKTVYLQMNSLEPEDTAMYYCKASYWKWGKLNNFWGPGTQVTVSSAS
HHHHHH
> SEQ ID NO: 183; DR645(DR230-DR584)
QVQLQESGGGLVQPGGSLRLSCAASGFTFSSAHMSWVRQAPGKGREWIA
SIYSGGGTFYADSVKGRFTISRDNAKNTLYLQLNSLKAEDTAMYYCATN
RLHYYSDDDSLRGQGTQVTVSSGGGSQVQLQESGGGLVQPGGSLKLSCA
ASGFRFSNYGMSWVRQAPGEGLEWVSYINGDGSRTHYADSVKGRFTISR
DNAKNTLYLQLNSLKTEDTAMYYCEKGLSRDGWSLSAASRGQGTQVTVS
SASHHHHHH
> SEQ ID NO: 184; DR646(DR230-DR585)
QVQLQESGGGLVQPGGSLRLSCAASGFTFSSAHMSWVRQAPGKGREWIA
SIYSGGGTFYADSVKGRFTISRDNAKNTLYLQLNSLKAEDTAMYYCATN
RLHYYSDDDSLRGQGTQVTVSSGGGSQVQLQESGGGSVQTGGSLRLSCA
VSGYTTYSFNYMGWFRQAPGKEREGVAVIYTGGGSTLYADSVKGRFTIS
QDNAKNTVYLQMNSLKPEDTAMYYCAADDQRFASPLYAYFGYWGQGTQV
TVSSASHHHHHH
> SEQ ID NO: 185; DR647(DR230-DR586)
QVQLQESGGGLVQPGGSLRLSCAASGFTFSSAHMSWVRQAPGKGREWIA
SIYSGGGTFYADSVKGRFTISRDNAKNTLYLQLNSLKAEDTAMYYCATN
RLHYYSDDDSLRGQGTQVTVSSGGGSQVQLQESGGGLVQPGGSLRLSCV
ASGFTFSNYWIFWVRQAAGKGLEWLSTSNTGGDTTKYADSVKGRFTISR
DSAKNTEYLQMNSLKPEDTAVYYCETGRCARSGGYQGTQVTVSSASHHH
HHH
> SEQ ID NO: 186; DR648(DR230-DR587)
QVQLQESGGGLVQPGGSLRLSCAASGFTFSSAHMSWVRQAPGKGREWIA
SIYSGGGTFYADSVKGRFTISRDNAKNTLYLQLNSLKAEDTAMYYCATN
RLHYYSDDDSLRGQGTQVTVSSGGGSQVQLQESGGGSVQVGGSLRLSCA
TSGDTKSIRCMGWFRQTPGKEREGIAAIDREGFATYADSVYDRFTIAQD
NAQNTLYLEMNALKPEDTAMYYCAAQNMCRVVRGAMTGVDYWGKGTQVT
VSSASHHHHHH
> SEQ ID NO: 187; DR649(DR230-DR588)
QVQLQESGGGLVQPGGSLRLSCAASGFTFSSAHMSWVRQAPGKGREWIA
SIYSGGGTFYADSVKGRFTISRDNAKNTLYLQLNSLKAEDTAMYYCATN
RLHYYSDDDSLRGQGTQVTVSSGGGSQVQLQESGGGSVQVGGSLKLSCA
ASGYTYSSYYCMGWFRQAPGKEREGVAAIDSDGSTSYADSVKGRFTISQ
DDAKNTLYLQMNSLKPEDTAMYYCAASYEVVDCYPSGYGQDYWGKGTQV
TVSSASHHHHHH
> SEQ ID NO: 188; DR650(DR230-DR589)
QVQLQESGGGLVQPGGSLRLSCAASGFTFSSAHMSWVRQAPGKGREWIA
SIYSGGGTFYADSVKGRFTISRDNAKNTLYLQLNSLKAEDTAMYYCATN
RLHYYSDDDSLRGQGTQVTVSSGGGSQVQLQESGGGSVQAGGSLRLSCA
ASEYTASRYCMAWFRQAPGKEREGVAAIHPGGGTTYYADSVKGRFSISQ
DSADNTLYLQMNSLKPEDTAMYYCAAGSLWVPFGDRCAANYWGQGTQVT
VSSASHHHHHH
> SEQ ID NO: 189; DR651(DR230-DR590)
QVQLQESGGGLVQPGGSLRLSCAASGFTFSSAHMSWVRQAPGKGREWIA
SIYSGGGTFYADSVKGRFTISRDNAKNTLYLQLNSLKAEDTAMYYCATN
RLHYYSDDDSLRGQGTQVTVSSGGGSQVQLQESGGGSVQAGGSLRLSCA
ASGYEYCRIHMTWYRQGPGKEREFVSSIGSDGRKTYANSVTGRFTISRD
NANHTVYLQMNSLSPEDTAMYYCKTEYLYGLGCPDGSAYWGQGTQVTVS
SASHHHHHH
> SEQ ID NO: 190; DR652(DR231-DR214)
QVQLQESGGGSVQAGGSLRLSCTASGFTFDDREMNWYRQAPGNECELVS
TISSDGSTYYADSVKGRFTISQDNAKNTVYLQMDSVKPEDTAVYYCAAD
FMIAIQAPGAGCWGQGTQVTVSSGGGSQVQLLESGGGLVQPGGSLRLSC
AASGVRISTQDMSWVRQAPGKGLEWVSSILTPNGSTYYADSVKGRFTIS
RDNSKNTLYLQMNSLRAEDTAVYYCAGVDERCEAEDQIDYWGQGTLVTV
SSASHHHHHH
> SEQ ID NO: 191; DR653(DR231-DR217)
QVQLQESGGGSVQAGGSLRLSCTASGFTFDDREMNWYRQAPGNECELVS
TISSDGSTYYADSVKGRFTISQDNAKNTVYLQMDSVKPEDTAVYYCAAD
FMIAIQAPGAGCWGQGTQVTVSSGGGSQVQLLESGGGLVQPGGSLRLSC
AASGDMIISEDMSWVRQAPGKGLEWVSTIASDDGSTYYADSVKGRFTIS
RDNSKNTLYLQMNSLRAEDTAVYYCAGFDAQDAAIEYWGQGTLVTVSSA
SHHHHHH
> SEQ ID NO: 192; DR654(DR231-DR583)
QVQLQESGGGSVQAGGSLRLSCTASGFTFDDREMNWYRQAPGNECELVS
TISSDGSTYYADSVKGRFTISQDNAKNTVYLQMDSVKPEDTAVYYCAAD
FMIAIQAPGAGCWGQGTQVTVSSGGGSQVQLQESGGGSVQAGGSLRLSC
VGSGYTYDTSDMSWYRQAPGKEREFVSDIDSGDWAAYADAVKGRFTISR
DNAKKTVYLQMNSLEPEDTAMYYCKASYWKWGKLNNFWGPGTQVTVSSA
SHHHHHH
> SEQ ID NO: 193; DR655(DR231-DR584)
QVQLQESGGGSVQAGGSLRLSCTASGFTFDDREMNWYRQAPGNECELVS
TISSDGSTYYADSVKGRFTISQDNAKNTVYLQMDSVKPEDTAVYYCAAD
FMIAIQAPGAGCWGQGTQVTVSSGGGSQVQLQESGGGLVQPGGSLKLSC
AASGFRFSNYGMSWVRQAPGEGLEWVSYINGDGSRTHYADSVKGRFTIS
RDNAKNTLYLQLNSLKTEDTAMYYCEKGLSRDGWSLSAASRGQGTQVTV
SSASHHHHHH
> SEQ ID NO: 194; DR656(DR231-DR585)
QVQLQESGGGSVQAGGSLRLSCTASGFTFDDREMNWYRQAPGNECELVS
TISSDGSTYYADSVKGRFTISQDNAKNTVYLQMDSVKPEDTAVYYCAAD
FMIAIQAPGAGCWGQGTQVTVSSGGGSQVQLQESGGGSVQTGGSLRLSC
AVSGYTTYSFNYMGWFRQAPGKEREGVAVIYTGGGSTLYADSVKGRFTI
SQDNAKNTVYLQMNSLKPEDTAMYYCAADDQRFASPLYAYFGYWGQGTQ
VTVSSASHHHHHH
> SEQ ID NO: 195; DR657(DR231-DR586)
QVQLQESGGGSVQAGGSLRLSCTASGFTFDDREMNWYRQAPGNECELVS
TISSDGSTYYADSVKGRFTISQDNAKNTVYLQMDSVKPEDTAVYYCAAD
FMIAIQAPGAGCWGQGTQVTVSSGGGSQVQLQESGGGLVQPGGSLRLSC
VASGFTFSNYWIFWVRQAAGKGLEWLSTSNTGGDTTKYADSVKGRFTIS
RDSAKNTEYLQMNSLKPEDTAVYYCETGRCARSGGYQGTQVTVSSASHH
HHHH
> SEQ ID NO: 196; DR658(DR231-DR587)
QVQLQESGGGSVQAGGSLRLSCTASGFTFDDREMNWYRQAPGNECELVS
TISSDGSTYYADSVKGRFTISQDNAKNTVYLQMDSVKPEDTAVYYCAAD
FMIAIQAPGAGCWGQGTQVTVSSGGGSQVQLQESGGGSVQVGGSLRLSC
ATSGDTKSIRCMGWFRQTPGKEREGIAAIDREGFATYADSVYDRFTIAQ
DNAQNTLYLEMNALKPEDTAMYYCAAQNMCRVVRGAMTGVDYWGKGTQV
TVSSASHHHHHH
> SEQ ID NO: 197; DR659(DR231-DR588)
QVQLQESGGGSVQAGGSLRLSCTASGFTFDDREMNWYRQAPGNECELVS
TISSDGSTYYADSVKGRFTISQDNAKNTVYLQMDSVKPEDTAVYYCAAD
FMIAIQAPGAGCWGQGTQVTVSSGGGSQVQLQESGGGSVQVGGSLKLSC
AASGYTYSSYYCMGWFRQAPGKEREGVAAIDSDGSTSYADSVKGRFTIS
QDDAKNTLYLQMNSLKPEDTAMYYCAASYEVVDCYPSGYGQDYWGKGTQ
VTVSSASHHHHHH
> SEQ ID NO: 198; DR660(DR231-DR589)
QVQLQESGGGSVQAGGSLRLSCTASGFTFDDREMNWYRQAPGNECELVS
TISSDGSTYYADSVKGRFTISQDNAKNTVYLQMDSVKPEDTAVYYCAAD
FMIAIQAPGAGCWGQGTQVTVSSGGGSQVQLQESGGGSVQAGGSLRLSC
AASEYTASRYCMAWFRQAPGKEREGVAAIHPGGGTTYYADSVKGRFSIS
QDSADNTLYLQMNSLKPEDTAMYYCAAGSLWVPFGDRCAANYWGQGTQV
TVSSASHHHHHH
> SEQ ID NO: 199; DR661(DR231-DR590)
QVQLQESGGGSVQAGGSLRLSCTASGFTFDDREMNWYRQAPGNECELVS
TISSDGSTYYADSVKGRFTISQDNAKNTVYLQMDSVKPEDTAVYYCAAD
FMIAIQAPGAGCWGQGTQVTVSSGGGSQVQLQESGGGSVQAGGSLRLSC
AASGYEYCRIHMTWYRQGPGKEREFVSSIGSDGRKTYANSVTGRFTISR
DNANHTVYLQMNSLSPEDTAMYYCKTEYLYGLGCPDGSAYWGQGTQVTV
SSASHHHHHH
> SEQ ID NO: 200; DR662(DR232-DR214)
QVQLQESGGGSVQAGGSLRLSCVASGYTSCMGWFRQAPGKEREAVATIY
TRGRSIYYADSVKGRFTISQDNAKNTLYLQMNSLKPEDIAMYSCAAGGY
SWSAGCEFNYWGQGTQVTVSSGGGSQVQLLESGGGLVQPGGSLRLSCAA
SGVRISTQDMSWVRQAPGKGLEWVSSILTPNGSTYYADSVKGRFTISRD
NSKNTLYLQMNSLRAEDTAVYYCAGVDERCEAEDQIDYWGQGTLVTVSS
ASHHHHHH
> SEQ ID NO: 201; DR663(DR232-DR217)
QVQLQESGGGSVQAGGSLRLSCVASGYTSCMGWFRQAPGKEREAVATIY
TRGRSIYYADSVKGRFTISQDNAKNTLYLQMNSLKPEDIAMYSCAAGGY
SWSAGCEFNYWGQGTQVTVSSGGGSQVQLLESGGGLVQPGGSLRLSCAA
SGDMIISEDMSWVRQAPGKGLEWVSTIASDDGSTYYADSVKGRFTISRD
NSKNTLYLQMNSLRAEDTAVYYCAGFDAQDAAIEYWGQGTLVTVSSASH
HHHHH
> SEQ ID NO: 202; DR664(DR232-DR583)
QVQLQESGGGSVQAGGSLRLSCVASGYTSCMGWFRQAPGKEREAVATIY
TRGRSIYYADSVKGRFTISQDNAKNTLYLQMNSLKPEDIAMYSCAAGGY
SWSAGCEFNYWGQGTQVTVSSGGGSQVQLQESGGGSVQAGGSLRLSCVG
SGYTYDTSDMSWYRQAPGKEREFVSDIDSGDWAAYADAVKGRFTISRDN
AKKTVYLQMNSLEPEDTAMYYCKASYWKWGKLNNFWGPGTQVTVSSASH
HHHHH
> SEQ ID NO: 203; DR665(DR232-DR584)
QVQLQESGGGSVQAGGSLRLSCVASGYTSCMGWFRQAPGKEREAVATIY
TRGRSIYYADSVKGRFTISQDNAKNTLYLQMNSLKPEDIAMYSCAAGGY
SWSAGCEFNYWGQGTQVTVSSGGGSQVQLQESGGGLVQPGGSLKLSCAA
SGFRFSNYGMSWVRQAPGEGLEWVSYINGDGSRTHYADSVKGRFTISRD
NAKNTLYLQLNSLKTEDTAMYYCEKGLSRDGWSLSAASRGQGTQVTVSS
ASHHHHHH
> SEQ ID NO: 204; DR666(DR232-DR585)
QVQLQESGGGSVQAGGSLRLSCVASGYTSCMGWFRQAPGKEREAVATIY
TRGRSIYYADSVKGRFTISQDNAKNTLYLQMNSLKPEDIAMYSCAAGGY
SWSAGCEFNYWGQGTQVTVSSGGGSQVQLQESGGGSVQTGGSLRLSCAV
SGYTTYSFNYMGWFRQAPGKEREGVAVIYTGGGSTLYADSVKGRFTISQ
DNAKNTVYLQMNSLKPEDTAMYYCAADDQRFASPLYAYFGYWGQGTQVT
VSSASHHHHHH
> SEQ ID NQ: 205; DR667(DR232-DR586)
QVQLQESGGGSVQAGGSLRLSCVASGYTSCMGWFRQAPGKEREAVATIY
TRGRSIYYADSVKGRFTISQDNAKNTLYLQMNSLKPEDIAMYSCAAGGY
SWSAGCEFNYWGQGTQVTVSSGGGSQVQLQESGGGLVQPGGSLRLSCVA
SGFTFSNYWIFWVRQAAGKGLEWLSTSNTGGDTTKYADSVKGRFTISRD
SAKNTEYLQMNSLKPEDTAVYYCETGRCARSGGYQGTQVTVSSASHHHH
HH
> SEQ ID NO: 206; DR668(DR232-DR587)
QVQLQESGGGSVQAGGSLRLSCVASGYTSCMGWFRQAPGKEREAVATIY
TRGRSIYYADSVKGRFTISQDNAKNTLYLQMNSLKPEDIAMYSCAAGGY
SWSAGCEFNYWGQGTQVTVSSGGGSQVQLQESGGGSVQVGGSLRLSCAT
SGDTKSIRCMGWFRQTPGKEREGIAAIDREGFATYADSVYDRFTIAQDN
AQNTLYLEMNALKPEDTAMYYCAAQNMCRVVRGAMTGVDYWGKGTQVTV
SSASHHHHHH
> SEQ ID NO: 207; DR669(DR232-DR588)
QVQLQESGGGSVQAGGSLRLSCVASGYTSCMGWFRQAPGKEREAVATIY
TRGRSIYYADSVKGRFTISQDNAKNTLYLQMNSLKPEDIAMYSCAAGGY
SWSAGCEFNYWGQGTQVTVSSGGGSQVQLQESGGGSVQVGGSLKLSCAA
SGYTYSSYYCMGWFRQAPGKEREGVAAIDSDGSTSYADSVKGRFTISQD
DAKNTLYLQMNSLKPEDTAMYYCAASYEVVDCYPSGYGQDYWGKGTQVT
VSSASHHHHHH
> SEQ ID NO: 208; DR670(DR232-DR589)
QVQLQESGGGSVQAGGSLRLSCVASGYTSCMGWFRQAPGKEREAVATIY
TRGRSIYYADSVKGRFTISQDNAKNTLYLQMNSLKPEDIAMYSCAAGGY
SWSAGCEFNYWGQGTQVTVSSGGGSQVQLQESGGGSVQAGGSLRLSCAA
SEYTASRYCMAWFRQAPGKEREGVAAIHPGGGTTYYADSVKGRFSISQD
SADNTLYLQMNSLKPEDTAMYYCAAGSLWVPFGDRCAANYWGQGTQVTV
SSASHHHHHH
> SEQ ID NO: 209; DR671(DR232-DR590)
QVQLQESGGGSVQAGGSLRLSCVASGYTSCMGWFRQAPGKEREAVATIY
TRGRSIYYADSVKGRFTISQDNAKNTLYLQMNSLKPEDIAMYSCAAGGY
SWSAGCEFNYWGQGTQVTVSSGGGSQVQLQESGGGSVQAGGSLRLSCAA
SGYEYCRIHMTWYRQGPGKEREFVSSIGSDGRKTYANSVTGRFTISRDN
ANHTVYLQMNSLSPEDTAMYYCKTEYLYGLGCPDGSAYWGQGTQVTVSS
ASHHHHHH
> SEQ ID NO: 210; DR672(DR233-DR214)
QVQLQESGGGSVQAGGSLRLSCTASGFTFDDSDMGWYRQAPGNECELVS
TISSDGSTYYADSVKGRFTISQDNAKNTVYLQMNSLKPEDTAVYYCAAE
PRGYYSNYGGRRECNYWGQGTQVTVSSGGGSQVQLLESGGGLVQPGGSL
RLSCAASGVRISTQDMSWVRQAPGKGLEWVSSILTPNGSTYYADSVKGR
FTISRDNSKNTLYLQMNSLRAEDTAVYYCAGVDERCEAEDQIDYWGQGT
LVTVSSASHHHHHH
> SEQ ID NO: 211; DR673(DR233-DR217)
QVQLQESGGGSVQAGGSLRLSCTASGFTFDDSDMGWYRQAPGNECELVS
TISSDGSTYYADSVKGRFTISQDNAKNTVYLQMNSLKPEDTAVYYCAAE
PRGYYSNYGGRRECNYWGQGTQVTVSSGGGSQVQLLESGGGLVQPGGSL
RLSCAASGDMIISEDMSWVRQAPGKGLEWVSTIASDDGSTYYADSVKGR
FTISRDNSKNTLYLQMNSLRAEDTAVYYCAGFDAQDAAIEYWGQGTLVT
VSSASHHHHHH
> SEQ ID NO: 212; DR674(DR233-DR583)
QVQLQESGGGSVQAGGSLRLSCTASGFTFDDSDMGWYRQAPGNECELVS
TISSDGSTYYADSVKGRFTISQDNAKNTVYLQMNSLKPEDTAVYYCAAE
PRGYYSNYGGRRECNYWGQGTQVTVSSGGGSQVQLQESGGGSVQAGGSL
RLSCVGSGYTYDTSDMSWYRQAPGKEREFVSDIDSGDWAAYADAVKGRF
TISRDNAKKTVYLQMNSLEPEDTAMYYCKASYWKWGKLNNFWGPGTQVT
VSSASHHHHHH
> SEQ ID NO: 213; DR675(DR233-DR584)
QVQLQESGGGSVQAGGSLRLSCTASGFTFDDSDMGWYRQAPGNECELVS
TISSDGSTYYADSVKGRFTISQDNAKNTVYLQMNSLKPEDTAVYYCAAE
PRGYYSNYGGRRECNYWGQGTQVTVSSGGGSQVQLQESGGGLVQPGGSL
KLSCAASGFRFSNYGMSWVRQAPGEGLEWVSYINGDGSRTHYADSVKGR
FTISRDNAKNTLYLQLNSLKTEDTAMYYCEKGLSRDGWSLSAASRGQGT
QVTVSSASHHHHHH
> SEQ ID NO: 214; DR676(DR233-DR585)
QVQLQESGGGSVQAGGSLRLSCTASGFTFDDSDMGWYRQAPGNECELVS
TISSDGSTYYADSVKGRFTISQDNAKNTVYLQMNSLKPEDTAVYYCAAE
PRGYYSNYGGRRECNYWGQGTQVTVSSGGGSQVQLQESGGGSVQTGGSL
RLSCAVSGYTTYSFNYMGWFRQAPGKEREGVAVIYTGGGSTLYADSVKG
RFTISQDNAKNTVYLQMNSLKPEDTAMYYCAADDQRFASPLYAYFGYWG
QGTQVTVSSASHHHHHH
> SEQ ID NO: 215; DR677(DR233-DR586)
QVQLQESGGGSVQAGGSLRLSCTASGFTFDDSDMGWYRQAPGNECELVS
TISSDGSTYYADSVKGRFTISQDNAKNTVYLQMNSLKPEDTAVYYCAAE
PRGYYSNYGGRRECNYWGQGTQVTVSSGGGSQVQLQESGGGLVQPGGSL
RLSCVASGFTFSNYWIFWVRQAAGKGLEWLSTSNTGGDTTKYADSVKGR
FTISRDSAKNTEYLQMNSLKPEDTAVYYCETGRCARSGGYQGTQVTVSS
ASHHHHHH
> SEQ ID NO: 216; DR678(DR233-DR587)
QVQLQESGGGSVQAGGSLRLSCTASGFTFDDSDMGWYRQAPGNECELVS
TISSDGSTYYADSVKGRFTISQDNAKNTVYLQMNSLKPEDTAVYYCAAE
PRGYYSNYGGRRECNYWGQGTQVTVSSGGGSQVQLQESGGGSVQVGGSL
RLSCATSGDTKSIRCMGWFRQTPGKEREGIAAIDREGFATYADSVYDRF
TIAQDNAQNTLYLEMNALKPEDTAMYYCAAQNMCRVVRGAMTGVDYWGK
GTQVTVSSASHHHHHH
> SEQ ID NO: 217; DR679(DR233-DR588)
QVQLQESGGGSVQAGGSLRLSCTASGFTFDDSDMGWYRQAPGNECELVS
TISSDGSTYYADSVKGRFTISQDNAKNTVYLQMNSLKPEDTAVYYCAAE
PRGYYSNYGGRRECNYWGQGTQVTVSSGGGSQVQLQESGGGSVQVGGSL
KLSCAASGYTYSSYYCMGWFRQAPGKEREGVAAIDSDGSTSYADSVKGR
FTISQDDAKNTLYLQMNSLKPEDTAMYYCAASYEVVDCYPSGYGQDYWG
KGTQVTVSSASHHHHHH
> SEQ ID NO: 218; DR680(DR233-DR589)
QVQLQESGGGSVQAGGSLRLSCTASGFTFDDSDMGWYRQAPGNECELVS
TISSDGSTYYADSVKGRFTISQDNAKNTVYLQMNSLKPEDTAVYYCAAE
PRGYYSNYGGRRECNYWGQGTQVTVSSGGGSQVQLQESGGGSVQAGGSL
RLSCAASEYTASRYCMAWFRQAPGKEREGVAAIHPGGGTTYYADSVKGR
FSISQDSADNTLYLQMNSLKPEDTAMYYCAAGSLWVPFGDRCAANYWGQ
GTQVTVSSASHHHHHH
> SEQ ID NO: 219; DR681(DR233-DR590)
QVQLQESGGGSVQAGGSLRLSCTASGFTFDDSDMGWYRQAPGNECELVS
TISSDGSTYYADSVKGRFTISQDNAKNTVYLQMNSLKPEDTAVYYCAAE
PRGYYSNYGGRRECNYWGQGTQVTVSSGGGSQVQLQESGGGSVQAGGSL
RLSCAASGYEYCRIHMTWYRQGPGKEREFVSSIGSDGRKTYANSVTGRF
TISRDNANHTVYLQMNSLSPEDTAMYYCKTEYLYGLGCPDGSAYWGQGT
QVTVSSASHHHHHH
> SEQ ID NO: 220; DR682(DR234-DR214)
QVQLQESGGGSVQAGGSLRLSCVASGYTFSSYCMGWFRQAPGKEREGVA
ALGGGSTYYADSVKGRFTISQDNAKNTLYLQMNSLKPEDTAMYYCAAAW
VACLEFGGSWYDLARYKHWGQGTQVTVSSGGGSQVQLLESGGGLVQPGG
SLRLSCAASGVRISTQDMSWVRQAPGKGLEWVSSILTPNGSTYYADSVK
GRFTISRDNSKNTLYLQMNSLRAEDTAVYYCAGVDERCEAEDQIDYWGQ
GTLVTVSSASHHHHHH
> SEQ ID NO: 221; DR683(DR234-DR217)
QVQLQESGGGSVQAGGSLRLSCVASGYTFSSYCMGWFRQAPGKEREGVA
ALGGGSTYYADSVKGRFTISQDNAKNTLYLQMNSLKPEDTAMYYCAAAW
VACLEFGGSWYDLARYKHWGQGTQVTVSSGGGSQVQLLESGGGLVQPGG
SLRLSCAASGDMIISEDMSWVRQAPGKGLEWVSTIASDDGSTYYADSVK
GRFTISRDNSKNTLYLQMNSLRAEDTAVYYCAGFDAQDAAIEYWGQGTL
VTVSSASHHHHHH
> SEQ ID NO: 222; DR684(DR234-DR583)
QVQLQESGGGSVQAGGSLRLSCVASGYTFSSYCMGWFRQAPGKEREGVA
ALGGGSTYYADSVKGRFTISQDNAKNTLYLQMNSLKPEDTAMYYCAAAW
VACLEFGGSWYDLARYKHWGQGTQVTVSSGGGSQVQLQESGGGSVQAGG
SLRLSCVGSGYTYDTSDMSWYRQAPGKEREFVSDIDSGDWAAYADAVKG
RFTISRDNAKKTVYLQMNSLEPEDTAMYYCKASYWKWGKLNNFWGPGTQ
VTVSSASHHHHHH
> SEQ ID NO: 223; DR685(DR234-DR584)
QVQLQESGGGSVQAGGSLRLSCVASGYTFSSYCMGWFRQAPGKEREGVA
ALGGGSTYYADSVKGRFTISQDNAKNTLYLQMNSLKPEDTAMYYCAAAW
VACLEFGGSWYDLARYKHWGQGTQVTVSSGGGSQVQLQESGGGLVQPGG
SLKLSCAASGFRFSNYGMSWVRQAPGEGLEWVSYINGDGSRTHYADSVK
GRFTISRDNAKNTLYLQLNSLKTEDTAMYYCEKGLSRDGWSLSAASRGQ
GTQVTVSSASHHHHHH
> SEQ ID NO: 224; DR686(DR234-DR585)
QVQLQESGGGSVQAGGSLRLSCVASGYTFSSYCMGWFRQAPGKEREGVA
ALGGGSTYYADSVKGRFTISQDNAKNTLYLQMNSLKPEDTAMYYCAAAW
VACLEFGGSWYDLARYKHWGQGTQVTVSSGGGSQVQLQESGGGSVQTGG
SLRLSCAVSGYTTYSFNYMGWFRQAPGKEREGVAVIYTGGGSTLYADSV
KGRFTISQDNAKNTVYLQMNSLKPEDTAMYYCAADDQRFASPLYAYFGY
WGQGTQVTVSSASHHHHHH
> SEQ ID NO: 225; DR687(DR234-DR586)
QVQLQESGGGSVQAGGSLRLSCVASGYTFSSYCMGWFRQAPGKEREGVA
ALGGGSTYYADSVKGRFTISQDNAKNTLYLQMNSLKPEDTAMYYCAAAW
VACLEFGGSWYDLARYKHWGQGTQVTVSSGGGSQVQLQESGGGLVQPGG
SLRLSCVASGFTFSNYWIFWVRQAAGKGLEWLSTSNTGGDTTKYADSVK
GRFTISRDSAKNTEYLQMNSLKPEDTAVYYCETGRCARSGGYQGTQVTV
SSASHHHHHH
> SEQ ID NO: 226; DR688(DR234-DR587)
QVQLQESGGGSVQAGGSLRLSCVASGYTFSSYCMGWFRQAPGKEREGVA
ALGGGSTYYADSVKGRFTISQDNAKNTLYLQMNSLKPEDTAMYYCAAAW
VACLEFGGSWYDLARYKHWGQGTQVTVSSGGGSQVQLQESGGGSVQVGG
SLRLSCATSGDTKSIRCMGWFRQTPGKEREGIAAIDREGFATYADSVYD
RFTIAQDNAQNTLYLEMNALKPEDTAMYYCAAQNMCRVVRGAMTGVDYW
GKGTQVTVSSASHHHHHH
> SEQ ID NO: 227; DR689(DR234-DR588)
QVQLQESGGGSVQAGGSLRLSCVASGYTFSSYCMGWFRQAPGKEREGVA
ALGGGSTYYADSVKGRFTISQDNAKNTLYLQMNSLKPEDTAMYYCAAAW
VACLEFGGSWYDLARYKHWGQGTQVTVSSGGGSQVQLQESGGGSVQVGG
SLKLSCAASGYTYSSYYCMGWFRQAPGKEREGVAAIDSDGSTSYADSVK
GRFTISQDDAKNTLYLQMNSLKPEDTAMYYCAASYEVVDCYPSGYGQDY
WGKGTQVTVSSASHHHHHH
> SEQ ID NO: 228; DR690(DR234-DR589)
QVQLQESGGGSVQAGGSLRLSCVASGYTFSSYCMGWFRQAPGKEREGVA
ALGGGSTYYADSVKGRFTISQDNAKNTLYLQMNSLKPEDTAMYYCAAAW
VACLEFGGSWYDLARYKHWGQGTQVTVSSGGGSQVQLQESGGGSVQAGG
SLRLSCAASEYTASRYCMAWFRQAPGKEREGVAAIHPGGGTTYYADSVK
GRFSISQDSADNTLYLQMNSLKPEDTAMYYCAAGSLWVPFGDRCAANYW
GQGTQVTVSSASHHHHHH
> SEQ ID NO: 229; DR691(DR234-DR590)
QVQLQESGGGSVQAGGSLRLSCVASGYTFSSYCMGWFRQAPGKEREGVA
ALGGGSTYYADSVKGRFTISQDNAKNTLYLQMNSLKPEDTAMYYCAAAW
VACLEFGGSWYDLARYKHWGQGTQVTVSSGGGSQVQLQESGGGSVQAGG
SLRLSCAASGYEYCRIHMTWYRQGPGKEREFVSSIGSDGRKTYANSVTG
RFTISRDNANHTVYLQMNSLSPEDTAMYYCKTEYLYGLGCPDGSAYWGQ
GTQVTVSSASHHHHHH
> SEQ ID NO: 230; DR692(DR214-DR229)
QVQLLESGGGLVQPGGSLRLSCAASGVRISTQDMSWVRQAPGKGLEWVS
SILTPNGSTYYADSVKGRFTISRDNSKNTLYLQMNSLRAEDTAVYYCAG
VDERCEAEDQIDYWGQGTLVTVSSGGGSQVQLQESGGGLVQPGGSLRLS
CTASGFSFSSYPMTWARQAPGKGLEWVSTIASDGGSTAYAASVEGRFTI
SRDNAKSTLYLQLNSLKTEDTAMYYCTKGYGDGTPAPGQGTQVTVSSAS
HHHHHH
> SEQ ID NO: 231; DR693(DR214-DR230)
QVQLLESGGGLVQPGGSLRLSCAASGVRISTQDMSWVRQAPGKGLEWVS
SILTPNGSTYYADSVKGRFTISRDNSKNTLYLQMNSLRAEDTAVYYCAG
VDERCEAEDQIDYWGQGTLVTVSSGGGSQVQLQESGGGLVQPGGSLRLS
CAASGFTFSSAHMSWVRQAPGKGREWIASIYSGGGTFYADSVKGRFTIS
RDNAKNTLYLQLNSLKAEDTAMYYCATNRLHYYSDDDSLRGQGTQVTVS
SASHHHHHH
> SEQ ID NO: 232; DR694(DR214-DR231)
QVQLLESGGGLVQPGGSLRLSCAASGVRISTQDMSWVRQAPGKGLEWVS
SILTPNGSTYYADSVKGRFTISRDNSKNTLYLQMNSLRAEDTAVYYCAG
VDERCEAEDQIDYWGQGTLVTVSSGGGSQVQLQESGGGSVQAGGSLRLS
CTASGFTFDDREMNWYRQAPGNECELVSTISSDGSTYYADSVKGRFTIS
QDNAKNTVYLQMDSVKPEDTAVYYCAADFMIAIQAPGAGCWGQGTQVTV
SSASHHHHHH
> SEQ ID NO: 233; DR695(DR214-DR232)
QVQLLESGGGLVQPGGSLRLSCAASGVRISTQDMSWVRQAPGKGLEWVS
SILTPNGSTYYADSVKGRFTISRDNSKNTLYLQMNSLRAEDTAVYYCAG
VDERCEAEDQIDYWGQGTLVTVSSGGGSQVQLQESGGGSVQAGGSLRLS
CVASGYTSCMGWFRQAPGKEREAVATIYTRGRSIYYADSVKGRFTISQD
NAKNTLYLQMNSLKPEDIAMYSCAAGGYSWSAGCEFNYWGQGTQVTVSS
ASHHHHHH
> SEQ ID NO: 234; DR696(DR214-DR233)
QVQLLESGGGLVQPGGSLRLSCAASGVRISTQDMSWVRQAPGKGLEWVS
SILTPNGSTYYADSVKGRFTISRDNSKNTLYLQMNSLRAEDTAVYYCAG
VDERCEAEDQIDYWGQGTLVTVSSGGGSQVQLQESGGGSVQAGGSLRLS
CTASGFTFDDSDMGWYRQAPGNECELVSTISSDGSTYYADSVKGRFTIS
QDNAKNTVYLQMNSLKPEDTAVYYCAAEPRGYYSNYGGRRECNYWGQGT
QVTVSSASHHHHHH
> SEQ ID NO: 235; DR697(DR214-DR234)
QVQLLESGGGLVQPGGSLRLSCAASGVRISTQDMSWVRQAPGKGLEWVS
SILTPNGSTYYADSVKGRFTISRDNSKNTLYLQMNSLRAEDTAVYYCAG
VDERCEAEDQIDYWGQGTLVTVSSGGGSQVQLQESGGGSVQAGGSLRLS
CVASGYTFSSYCMGWFRQAPGKEREGVAALGGGSTYYADSVKGRFTISQ
DNAKNTLYLQMNSLKPEDTAMYYCAAAWVACLEFGGSWYDLARYKHWGQ
GTQVTVSSASHHHHHH
> SEQ ID NO: 236; DR698(DR217-DR229)
QVQLLESGGGLVQPGGSLRLSCAASGDMIISEDMSWVRQAPGKGLEWVS
TIASDDGSTYYADSVKGRFTISRDNSKNTLYLQMNSLRAEDTAVYYCAG
FDAQDAAIEYWGQGTLVTVSSGGGSQVQLQESGGGLVQPGGSLRLSCTA
SGFSFSSYPMTWARQAPGKGLEWVSTIASDGGSTAYAASVEGRFTISRD
NAKSTLYLQLNSLKTEDTAMYYCTKGYGDGTPAPGQGTQVTVSSASHHH
HHH
> SEQ ID NO: 237; DR699(DR217-DR230)
QVQLLESGGGLVQPGGSLRLSCAASGDMIISEDMSWVRQAPGKGLEWVS
TIASDDGSTYYADSVKGRFTISRDNSKNTLYLQMNSLRAEDTAVYYCAG
FDAQDAAIEYWGQGTLVTVSSGGGSQVQLQESGGGLVQPGGSLRLSCAA
SGFTFSSAHMSWVRQAPGKGREWIASIYSGGGTFYADSVKGRFTISRDN
AKNTLYLQLNSLKAEDTAMYYCATNRLHYYSDDDSLRGQGTQVTVSSAS
HHHHHH
> SEQ ID NO: 238; DR700(DR217-DR231)
QVQLLESGGGLVQPGGSLRLSCAASGDMIISEDMSWVRQAPGKGLEWVS
TIASDDGSTYYADSVKGRFTISRDNSKNTLYLQMNSLRAEDTAVYYCAG
FDAQDAAIEYWGQGTLVTVSSGGGSQVQLQESGGGSVQAGGSLRLSCTA
SGFTFDDREMNWYRQAPGNECELVSTISSDGSTYYADSVKGRFTISQDN
AKNTVYLQMDSVKPEDTAVYYCAADFMIAIQAPGAGCWGQGTQVTVSSA
SHHHHHH
> SEQ ID NO: 239; DR701(DR217-DR232)
QVQLLESGGGLVQPGGSLRLSCAASGDMIISEDMSWVRQAPGKGLEWVS
TIASDDGSTYYADSVKGRFTISRDNSKNTLYLQMNSLRAEDTAVYYCAG
FDAQDAAIEYWGQGTLVTVSSGGGSQVQLQESGGGSVQAGGSLRLSCVA
SGYTSCMGWFRQAPGKEREAVATIYTRGRSIYYADSVKGRFTISQDNAK
NTLYLQMNSLKPEDIAMYSCAAGGYSWSAGCEFNYWGQGTQVTVSSASH
HHHHH
> SEQ ID NO: 240; DR702(DR217-DR233)
QVQLLESGGGLVQPGGSLRLSCAASGDMIISEDMSWVRQAPGKGLEWVS
TIASDDGSTYYADSVKGRFTISRDNSKNTLYLQMNSLRAEDTAVYYCAG
FDAQDAAIEYWGQGTLVTVSSGGGSQVQLQESGGGSVQAGGSLRLSCTA
SGFTFDDSDMGWYRQAPGNECELVSTISSDGSTYYADSVKGRFTISQDN
AKNTVYLQMNSLKPEDTAVYYCAAEPRGYYSNYGGRRECNYWGQGTQVT
VSSASHHHHHH
> SEQ ID NO: 241; DR703(DR217-DR234)
QVQLLESGGGLVQPGGSLRLSCAASGDMIISEDMSWVRQAPGKGLEWVS
TIASDDGSTYYADSVKGRFTISRDNSKNTLYLQMNSLRAEDTAVYYCAG
FDAQDAAIEYWGQGTLVTVSSGGGSQVQLQESGGGSVQAGGSLRLSCVA
SGYTFSSYCMGWFRQAPGKEREGVAALGGGSTYYADSVKGRFTISQDNA
KNTLYLQMNSLKPEDTAMYYCAAAWVACLEFGGSWYDLARYKHWGQGTQ
VTVSSASHHHHHH
> SEQ ID NO: 242; DR704(DR583-DR229)
QVQLQESGGGSVQAGGSLRLSCVGSGYTYDTSDMSWYRQAPGKEREFVS
DIDSGDWAAYADAVKGRFTISRDNAKKTVYLQMNSLEPEDTAMYYCKAS
YWKWGKLNNFWGPGTQVTVSSGGGSQVQLQESGGGLVQPGGSLRLSCTA
SGFSFSSYPMTWARQAPGKGLEWVSTIASDGGSTAYAASVEGRFTISRD
NAKSTLYLQLNSLKTEDTAMYYCTKGYGDGTPAPGQGTQVTVSSASHHH
HHH
> SEQ ID NO: 243; DR705(DR583-DR230)
QVQLQESGGGSVQAGGSLRLSCVGSGYTYDTSDMSWYRQAPGKEREFVS
DIDSGDWAAYADAVKGRFTISRDNAKKTVYLQMNSLEPEDTAMYYCKAS
YWKWGKLNNFWGPGTQVTVSSGGGSQVQLQESGGGLVQPGGSLRLSCAA
SGFTFSSAHMSWVRQAPGKGREWIASIYSGGGTFYADSVKGRFTISRDN
AKNTLYLQLNSLKAEDTAMYYCATNRLHYYSDDDSLRGQGTQVTVSSAS
HHHHHH
> SEQ ID NO: 244; DR706(DR583-DR231)
QVQLQESGGGSVQAGGSLRLSCVGSGYTYDTSDMSWYRQAPGKEREFVS
DIDSGDWAAYADAVKGRFTISRDNAKKTVYLQMNSLEPEDTAMYYCKAS
YWKWGKLNNFWGPGTQVTVSSGGGSQVQLQESGGGSVQAGGSLRLSCTA
SGFTFDDREMNWYRQAPGNECELVSTISSDGSTYYADSVKGRFTISQDN
AKNTVYLQMDSVKPEDTAVYYCAADFMIAIQAPGAGCWGQGTQVTVSSA
SHHHHHH
> SEQ ID NO: 245; DR707(DR583-DR232)
QVQLQESGGGSVQAGGSLRLSCVGSGYTYDTSDMSWYRQAPGKEREFVS
DIDSGDWAAYADAVKGRFTISRDNAKKTVYLQMNSLEPEDTAMYYCKAS
YWKWGKLNNFWGPGTQVTVSSGGGSQVQLQESGGGSVQAGGSLRLSCVA
SGYTSCMGWFRQAPGKEREAVATIYTRGRSIYYADSVKGRFTISQDNAK
NTLYLQMNSLKPEDIAMYSCAAGGYSWSAGCEFNYWGQGTQVTVSSASH
HHHHH
> SEQ ID NO: 246; DR708(DR583-DR233)
QVQLQESGGGSVQAGGSLRLSCVGSGYTYDTSDMSWYRQAPGKEREFVS
DIDSGDWAAYADAVKGRFTISRDNAKKTVYLQMNSLEPEDTAMYYCKAS
YWKWGKLNNFWGPGTQVTVSSGGGSQVQLQESGGGSVQAGGSLRLSCTA
SGFTFDDSDMGWYRQAPGNECELVSTISSDGSTYYADSVKGRFTISQDN
AKNTVYLQMNSLKPEDTAVYYCAAEPRGYYSNYGGRRECNYWGQGTQVT
VSSASHHHHHH
> SEQ ID NO: 247; DR709(DR583-DR234)
QVQLQESGGGSVQAGGSLRLSCVGSGYTYDTSDMSWYRQAPGKEREFVS
DIDSGDWAAYADAVKGRFTISRDNAKKTVYLQMNSLEPEDTAMYYCKAS
YWKWGKLNNFWGPGTQVTVSSGGGSQVQLQESGGGSVQAGGSLRLSCVA
SGYTFSSYCMGWFRQAPGKEREGVAALGGGSTYYADSVKGRFTISQDNA
KNTLYLQMNSLKPEDTAMYYCAAAWVACLEFGGSWYDLARYKHWGQGTQ
VTVSSASHHHHHH
> SEQ ID NO: 248; DR710(DR584-DR229)
QVQLQESGGGLVQPGGSLKLSCAASGFRFSNYGMSWVRQAPGEGLEWVS
YINGDGSRTHYADSVKGRFTISRDNAKNTLYLQLNSLKTEDTAMYYCEK
GLSRDGWSLSAASRGQGTQVTVSSGGGSQVQLQESGGGLVQPGGSLRLS
CTASGFSFSSYPMTWARQAPGKGLEWVSTIASDGGSTAYAASVEGRFTI
SRDNAKSTLYLQLNSLKTEDTAMYYCTKGYGDGTPAPGQGTQVTVSSAS
HHHHHH
> SEQ ID NO: 249; DR711(DR584-DR230)
QVQLQESGGGLVQPGGSLKLSCAASGFRFSNYGMSWVRQAPGEGLEWVS
YINGDGSRTHYADSVKGRFTISRDNAKNTLYLQLNSLKTEDTAMYYCEK
GLSRDGWSLSAASRGQGTQVTVSSGGGSQVQLQESGGGLVQPGGSLRLS
CAASGFTFSSAHMSWVRQAPGKGREWIASIYSGGGTFYADSVKGRFTIS
RDNAKNTLYLQLNSLKAEDTAMYYCATNRLHYYSDDDSLRGQGTQVTVS
SASHHHHHH
> SEQ ID NO: 250; DR712(DR584-DR231)
QVQLQESGGGLVQPGGSLKLSCAASGFRFSNYGMSWVRQAPGEGLEWVS
YINGDGSRTHYADSVKGRFTISRDNAKNTLYLQLNSLKTEDTAMYYCEK
GLSRDGWSLSAASRGQGTQVTVSSGGGSQVQLQESGGGSVQAGGSLRLS
CTASGFTFDDREMNWYRQAPGNECELVSTISSDGSTYYADSVKGRFTIS
QDNAKNTVYLQMDSVKPEDTAVYYCAADFMIAIQAPGAGCWGQGTQVTV
SSASHHHHHH
> SEQ ID NO: 251; DR713(DR584-DR232)
QVQLQESGGGLVQPGGSLKLSCAASGFRFSNYGMSWVRQAPGEGLEWVS
YINGDGSRTHYADSVKGRFTISRDNAKNTLYLQLNSLKTEDTAMYYCEK
GLSRDGWSLSAASRGQGTQVTVSSGGGSQVQLQESGGGSVQAGGSLRLS
CVASGYTSCMGWFRQAPGKEREAVATIYTRGRSIYYADSVKGRFTISQD
NAKNTLYLQMNSLKPEDIAMYSCAAGGYSWSAGCEFNYWGQGTQVTVSS
ASHHHHHH
> SEQ ID NO: 252; DR714(DR584-DR233)
QVQLQESGGGLVQPGGSLKLSCAASGFRFSNYGMSWVRQAPGEGLEWVS
YINGDGSRTHYADSVKGRFTISRDNAKNTLYLQLNSLKTEDTAMYYCEK
GLSRDGWSLSAASRGQGTQVTVSSGGGSQVQLQESGGGSVQAGGSLRLS
CTASGFTFDDSDMGWYRQAPGNECELVSTISSDGSTYYADSVKGRFTIS
QDNAKNTVYLQMNSLKPEDTAVYYCAAEPRGYYSNYGGRRECNYWGQGT
QVTVSSASHHHHHH
> SEQ ID NO: 253; DR715(DR584-DR234)
QVQLQESGGGLVQPGGSLKLSCAASGFRFSNYGMSWVRQAPGEGLEWVS
YINGDGSRTHYADSVKGRFTISRDNAKNTLYLQLNSLKTEDTAMYYCEK
GLSRDGWSLSAASRGQGTQVTVSSGGGSQVQLQESGGGSVQAGGSLRLS
CVASGYTFSSYCMGWFRQAPGKEREGVAALGGGSTYYADSVKGRFTISQ
DNAKNTLYLQMNSLKPEDTAMYYCAAAWVACLEFGGSWYDLARYKHWGQ
GTQVTVSSASHHHHHH
> SEQ ID NO: 254 DR716(DR585-DR229)
QVQLQESGGGSVQTGGSLRLSCAVSGYTTYSFNYMGWFRQAPGKEREGV
AVIYTGGGSTLYADSVKGRFTISQDNAKNTVYLQMNSLKPEDTAMYYCA
ADDQRFASPLYAYFGYWGQGTQVTVSSGGGSQVQLQESGGGLVQPGGSL
RLSCTASGFSFSSYPMTWARQAPGKGLEWVSTIASDGGSTAYAASVEGR
FTISRDNAKSTLYLQLNSLKTEDTAMYYCTKGYGDGTPAPGQGTQVTVS
SASHHHHHH
> SEQ ID NO: 255; DR717(DR585-DR230)
QVQLQESGGGSVQTGGSLRLSCAVSGYTTYSFNYMGWFRQAPGKEREGV
AVIYTGGGSTLYADSVKGRFTISQDNAKNTVYLQMNSLKPEDTAMYYCA
ADDQRFASPLYAYFGYWGQGTQVTVSSGGGSQVQLQESGGGLVQPGGSL
RLSCAASGFTFSSAHMSWVRQAPGKGREWIASIYSGGGTFYADSVKGRF
TISRDNAKNTLYLQLNSLKAEDTAMYYCATNRLHYYSDDDSLRGQGTQV
TVSSASHHHHHH
> SEQ ID NO: 256; DR718(DR585-DR231)
QVQLQESGGGSVQTGGSLRLSCAVSGYTTYSFNYMGWFRQAPGKEREGV
AVIYTGGGSTLYADSVKGRFTISQDNAKNTVYLQMNSLKPEDTAMYYCA
ADDQRFASPLYAYFGYWGQGTQVTVSSGGGSQVQLQESGGGSVQAGGSL
RLSCTASGFTFDDREMNWYRQAPGNECELVSTISSDGSTYYADSVKGRF
TISQDNAKNTVYLQMDSVKPEDTAVYYCAADFMIAIQAPGAGCWGQGTQ
VTVSSASHHHHHH
> SEQ ID NO: 257; DR719(DR585-DR232)
QVQLQESGGGSVQTGGSLRLSCAVSGYTTYSFNYMGWFRQAPGKEREGV
AVIYTGGGSTLYADSVKGRFTISQDNAKNTVYLQMNSLKPEDTAMYYCA
ADDQRFASPLYAYFGYWGQGTQVTVSSGGGSQVQLQESGGGSVQAGGSL
RLSCVASGYTSCMGWFRQAPGKEREAVATIYTRGRSIYYADSVKGRFTI
SQDNAKNTLYLQMNSLKPEDIAMYSCAAGGYSWSAGCEFNYWGQGTQVT
VSSASHHHHHH
> SEQ ID NO: 258; DR720(DR585-DR233)
QVQLQESGGGSVQTGGSLRLSCAVSGYTTYSFNYMGWFRQAPGKEREGV
AVIYTGGGSTLYADSVKGRFTISQDNAKNTVYLQMNSLKPEDTAMYYCA
ADDQRFASPLYAYFGYWGQGTQVTVSSGGGSQVQLQESGGGSVQAGGSL
RLSCTASGFTFDDSDMGWYRQAPGNECELVSTISSDGSTYYADSVKGRF
TISQDNAKNTVYLQMNSLKPEDTAVYYCAAEPRGYYSNYGGRRECNYWG
QGTQVTVSSASHHHHHH
> SEQ ID NO: 259; DR721(DR585-DR234)
QVQLQESGGGSVQTGGSLRLSCAVSGYTTYSFNYMGWFRQAPGKEREGV
AVIYTGGGSTLYADSVKGRFTISQDNAKNTVYLQMNSLKPEDTAMYYCA
ADDQRFASPLYAYFGYWGQGTQVTVSSGGGSQVQLQESGGGSVQAGGSL
RLSCVASGYTFSSYCMGWFRQAPGKEREGVAALGGGSTYYADSVKGRFT
ISQDNAKNTLYLQMNSLKPEDTAMYYCAAAWVACLEFGGSWYDLARYKH
WGQGTQVTVSSASHHHHHH
> SEQ ID NO: 260; DR722(DR586-DR229)
QVQLQESGGGLVQPGGSLRLSCVASGFTFSNYWIFWVRQAAGKGLEWLS
TSNTGGDTTKYADSVKGRFTISRDSAKNTEYLQMNSLKPEDTAVYYCET
GRCARSGGYQGTQVTVSSGGGSQVQLQESGGGLVQPGGSLRLSCTASGF
SFSSYPMTWARQAPGKGLEWVSTIASDGGSTAYAASVEGRFTISRDNAK
STLYLQLNSLKTEDTAMYYCTKGYGDGTPAPGQGTQVTVSSASHHHHHH
> SEQ ID NO: 261; DR723(DR586-DR230)
QVQLQESGGGLVQPGGSLRLSCVASGFTFSNYWIFWVRQAAGKGLEWLS
TSNTGGDTTKYADSVKGRFTISRDSAKNTEYLQMNSLKPEDTAVYYCET
GRCARSGGYQGTQVTVSSGGGSQVQLQESGGGLVQPGGSLRLSCAASGF
TFSSAHMSWVRQAPGKGREWIASIYSGGGTFYADSVKGRFTISRDNAKN
TLYLQLNSLKAEDTAMYYCATNRLHYYSDDDSLRGQGTQVTVSSASHHH
HHH
> SEQ ID NO: 262; DR724(DR586-DR231)
QVQLQESGGGLVQPGGSLRLSCVASGFTFSNYWIFWVRQAAGKGLEWLS
TSNTGGDTTKYADSVKGRFTISRDSAKNTEYLQMNSLKPEDTAVYYCET
GRCARSGGYQGTQVTVSSGGGSQVQLQESGGGSVQAGGSLRLSCTASGF
TFDDREMNWYRQAPGNECELVSTISSDGSTYYADSVKGRFTISQDNAKN
TVYLQMDSVKPEDTAVYYCAADFMIAIQAPGAGCWGQGTQVTVSSASHH
HHHH
> SEQ ID NO: 263; DR725(DR586-DR232)
QVQLQESGGGLVQPGGSLRLSCVASGFTFSNYWIFWVRQAAGKGLEWLS
TSNTGGDTTKYADSVKGRFTISRDSAKNTEYLQMNSLKPEDTAVYYCET
GRCARSGGYQGTQVTVSSGGGSQVQLQESGGGSVQAGGSLRLSCVASGY
TSCMGWFRQAPGKEREAVATIYTRGRSIYYADSVKGRFTISQDNAKNTL
YLQMNSLKPEDIAMYSCAAGGYSWSAGCEFNYWGQGTQVTVSSASHHHH
HH
> SEQ ID NO: 264; DR726(DR586-DR233)
QVQLQESGGGLVQPGGSLRLSCVASGFTFSNYWIFWVRQAAGKGLEWLS
TSNTGGDTTKYADSVKGRFTISRDSAKNTEYLQMNSLKPEDTAVYYCET
GRCARSGGYQGTQVTVSSGGGSQVQLQESGGGSVQAGGSLRLSCTASGF
TFDDSDMGWYRQAPGNECELVSTISSDGSTYYADSVKGRFTISQDNAKN
TVYLQMNSLKPEDTAVYYCAAEPRGYYSNYGGRRECNYWGQGTQVTVSS
ASHHHHHH
> SEQ ID NO: 265; DR727(DR586-DR234)
QVQLQESGGGLVQPGGSLRLSCVASGFTFSNYWIFWVRQAAGKGLEWLS
TSNTGGDTTKYADSVKGRFTISRDSAKNTEYLQMNSLKPEDTAVYYCET
GRCARSGGYQGTQVTVSSGGGSQVQLQESGGGSVQAGGSLRLSCVASGY
TFSSYCMGWFRQAPGKEREGVAALGGGSTYYADSVKGRFTISQDNAKNT
LYLQMNSLKPEDTAMYYCAAAWVACLEFGGSWYDLARYKHWGQGTQVTV
SSASHHHHHH
> SEQ ID NO: 266; DR728(DR587-DR229)
QVQLQESGGGSVQVGGSLRLSCATSGDTKSIRCMGWFRQTPGKEREGIA
AIDREGFATYADSVYDRFTIAQDNAQNTLYLEMNALKPEDTAMYYCAAQ
NMCRVVRGAMTGVDYWGKGTQVTVSSGGGSQVQLQESGGGLVQPGGSLR
LSCTASGFSFSSYPMTWARQAPGKGLEWVSTIASDGGSTAYAASVEGRF
TISRDNAKSTLYLQLNSLKTEDTAMYYCTKGYGDGTPAPGQGTQVTVSS
ASHHHHHH
> SEQ ID NO: 267; DR729(DR587-DR230)
QVQLQESGGGSVQVGGSLRLSCATSGDTKSIRCMGWFRQTPGKEREGIA
AIDREGFATYADSVYDRFTIAQDNAQNTLYLEMNALKPEDTAMYYCAAQ
NMCRVVRGAMTGVDYWGKGTQVTVSSGGGSQVQLQESGGGLVQPGGSLR
LSCAASGFTFSSAHMSWVRQAPGKGREWIASIYSGGGTFYADSVKGRFT
ISRDNAKNTLYLQLNSLKAEDTAMYYCATNRLHYYSDDDSLRGQGTQVT
VSSASHHHHHH
> SEQ ID NO: 268; DR730(DR587-DR231)
QVQLQESGGGSVQVGGSLRLSCATSGDTKSIRCMGWFRQTPGKEREGIA
AIDREGFATYADSVYDRFTIAQDNAQNTLYLEMNALKPEDTAMYYCAAQ
NMCRVVRGAMTGVDYWGKGTQVTVSSGGGSQVQLQESGGGSVQAGGSLR
LSCTASGFTFDDREMNWYRQAPGNECELVSTISSDGSTYYADSVKGRFT
ISQDNAKNTVYLQMDSVKPEDTAVYYCAADFMIAIQAPGAGCWGQGTQV
TVSSASHHHHHH
> SEQ ID NO: 269; DR731(DR587-DR232)
QVQLQESGGGSVQVGGSLRLSCATSGDTKSIRCMGWFRQTPGKEREGIA
AIDREGFATYADSVYDRFTIAQDNAQNTLYLEMNALKPEDTAMYYCAAQ
NMCRVVRGAMTGVDYWGKGTQVTVSSGGGSQVQLQESGGGSVQAGGSLR
LSCVASGYTSCMGWFRQAPGKEREAVATIYTRGRSIYYADSVKGRFTIS
QDNAKNTLYLQMNSLKPEDIAMYSCAAGGYSWSAGCEFNYWGQGTQVTV
SSASHHHHHH
> SEQ ID NO: 270; DR732(DR587-DR233)
QVQLQESGGGSVQVGGSLRLSCATSGDTKSIRCMGWFRQTPGKEREGIA
AIDREGFATYADSVYDRFTIAQDNAQNTLYLEMNALKPEDTAMYYCAAQ
NMCRVVRGAMTGVDYWGKGTQVTVSSGGGSQVQLQESGGGSVQAGGSLR
LSCTASGFTFDDSDMGWYRQAPGNECELVSTISSDGSTYYADSVKGRFT
ISQDNAKNTVYLQMNSLKPEDTAVYYCAAEPRGYYSNYGGRRECNYWGQ
GTQVTVSSASHHHHHH
> SEQ ID NO: 271; DR733(DR587-DR234)
QVQLQESGGGSVQVGGSLRLSCATSGDTKSIRCMGWFRQTPGKEREGIA
AIDREGFATYADSVYDRFTIAQDNAQNTLYLEMNALKPEDTAMYYCAAQ
NMCRVVRGAMTGVDYWGKGTQVTVSSGGGSQVQLQESGGGSVQAGGSLR
LSCVASGYTFSSYCMGWFRQAPGKEREGVAALGGGSTYYADSVKGRFTI
SQDNAKNTLYLQMNSLKPEDTAMYYCAAAWVACLEFGGSWYDLARYKHW
GQGTQVTVSSASHHHHHH
> SEQ ID NO: 272; DR734(DR588-DR229)
QVQLQESGGGSVQVGGSLKLSCAASGYTYSSYYCMGWFRQAPGKEREGV
AAIDSDGSTSYADSVKGRFTISQDDAKNTLYLQMNSLKPEDTAMYYCAA
SYEVVDCYPSGYGQDYWGKGTQVTVSSGGGSQVQLQESGGGLVQPGGSL
RLSCTASGFSFSSYPMTWARQAPGKGLEWVSTIASDGGSTAYAASVEGR
FTISRDNAKSTLYLQLNSLKTEDTAMYYCTKGYGDGTPAPGQGTQVTVS
SASHHHHHH
> SEQ ID NO: 273; DR735(DR588-DR230)
QVQLQESGGGSVQVGGSLKLSCAASGYTYSSYYCMGWFRQAPGKEREGV
AAIDSDGSTSYADSVKGRFTISQDDAKNTLYLQMNSLKPEDTAMYYCAA
SYEVVDCYPSGYGQDYWGKGTQVTVSSGGGSQVQLQESGGGLVQPGGSL
RLSCAASGFTFSSAHMSWVRQAPGKGREWIASIYSGGGTFYADSVKGRF
TISRDNAKNTLYLQLNSLKAEDTAMYYCATNRLHYYSDDDSLRGQGTQV
TVSSASHHHHHH
> SEQ ID NO: 274; DR736(DR588-DR231)
QVQLQESGGGSVQVGGSLKLSCAASGYTYSSYYCMGWFRQAPGKEREGV
AAIDSDGSTSYADSVKGRFTISQDDAKNTLYLQMNSLKPEDTAMYYCAA
SYEVVDCYPSGYGQDYWGKGTQVTVSSGGGSQVQLQESGGGSVQAGGSL
RLSCTASGFTFDDREMNWYRQAPGNECELVSTISSDGSTYYADSVKGRF
TISQDNAKNTVYLQMDSVKPEDTAVYYCAADFMIAIQAPGAGCWGQGTQ
VTVSSASHHHHHH
> SEQ ID NO: 275; DR737(DR588-DR232)
QVQLQESGGGSVQVGGSLKLSCAASGYTYSSYYCMGWFRQAPGKEREGV
AAIDSDGSTSYADSVKGRFTISQDDAKNTLYLQMNSLKPEDTAMYYCAA
SYEVVDCYPSGYGQDYWGKGTQVTVSSGGGSQVQLQESGGGSVQAGGSL
RLSCVASGYTSCMGWFRQAPGKEREAVATIYTRGRSIYYADSVKGRFTI
SQDNAKNTLYLQMNSLKPEDIAMYSCAAGGYSWSAGCEFNYWGQGTQVT
VSSASHHHHHH
> SEQ ID NO: 276; DR738(DR588-DR233)
QVQLQESGGGSVQVGGSLKLSCAASGYTYSSYYCMGWFRQAPGKEREGV
AAIDSDGSTSYADSVKGRFTISQDDAKNTLYLQMNSLKPEDTAMYYCAA
SYEVVDCYPSGYGQDYWGKGTQVTVSSGGGSQVQLQESGGGSVQAGGSL
RLSCTASGFTFDDSDMGWYRQAPGNECELVSTISSDGSTYYADSVKGRF
TISQDNAKNTVYLQMNSLKPEDTAVYYCAAEPRGYYSNYGGRRECNYWG
QGTQVTVSSASHHHHHH
> SEQ ID NO: 277; DR739(DR588-DR234)
QVQLQESGGGSVQVGGSLKLSCAASGYTYSSYYCMGWFRQAPGKEREGV
AAIDSDGSTSYADSVKGRFTISQDDAKNTLYLQMNSLKPEDTAMYYCAA
SYEVVDCYPSGYGQDYWGKGTQVTVSSGGGSQVQLQESGGGSVQAGGSL
RLSCVASGYTFSSYCMGWFRQAPGKEREGVAALGGGSTYYADSVKGRFT
ISQDNAKNTLYLQMNSLKPEDTAMYYCAAAWVACLEFGGSWYDLARYKH
WGQGTQVTVSSASHHHHHH
> SEQ ID NO: 278; DR740(DR589-DR229)
QVQLQESGGGSVQAGGSLRLSCAASEYTASRYCMAWFRQAPGKEREGVA
AIHPGGGTTYYADSVKGRFSISQDSADNTLYLQMNSLKPEDTAMYYCAA
GSLWVPFGDRCAANYWGQGTQVTVSSGGGSQVQLQESGGGLVQPGGSLR
LSCTASGFSFSSYPMTWARQAPGKGLEWVSTIASDGGSTAYAASVEGRF
TISRDNAKSTLYLQLNSLKTEDTAMYYCTKGYGDGTPAPGQGTQVTVSS
ASHHHHHH
> SEQ ID NO: 279; DR741(DR589-DR230)
QVQLQESGGGSVQAGGSLRLSCAASEYTASRYCMAWFRQAPGKEREGVA
AIHPGGGTTYYADSVKGRFSISQDSADNTLYLQMNSLKPEDTAMYYCAA
GSLWVPFGDRCAANYWGQGTQVTVSSGGGSQVQLQESGGGLVQPGGSLR
LSCAASGFTFSSAHMSWVRQAPGKGREWIASIYSGGGTFYADSVKGRFT
ISRDNAKNTLYLQLNSLKAEDTAMYYCATNRLHYYSDDDSLRGQGTQVT
VSSASHHHHHH
> SEQ ID NO: 280; DR742(DR589-DR231)
QVQLQESGGGSVQAGGSLRLSCAASEYTASRYCMAWFRQAPGKEREGVA
AIHPGGGTTYYADSVKGRFSISQDSADNTLYLQMNSLKPEDTAMYYCAA
GSLWVPFGDRCAANYWGQGTQVTVSSGGGSQVQLQESGGGSVQAGGSLR
LSCTASGFTFDDREMNWYRQAPGNECELVSTISSDGSTYYADSVKGRFT
ISQDNAKNTVYLQMDSVKPEDTAVYYCAADFMIAIQAPGAGCWGQGTQV
TVSSASHHHHHH
> SEQ ID NO: 281; DR743(DR589-DR232)
QVQLQESGGGSVQAGGSLRLSCAASEYTASRYCMAWFRQAPGKEREGVA
AIHPGGGTTYYADSVKGRFSISQDSADNTLYLQMNSLKPEDTAMYYCAA
GSLWVPFGDRCAANYWGQGTQVTVSSGGGSQVQLQESGGGSVQAGGSLR
LSCVASGYTSCMGWFRQAPGKEREAVATIYTRGRSIYYADSVKGRFTIS
QDNAKNTLYLQMNSLKPEDIAMYSCAAGGYSWSAGCEFNYWGQGTQVTV
SSASHHHHHH
> SEQ ID NO: 282; DR744(DR589-DR233)
QVQLQESGGGSVQAGGSLRLSCAASEYTASRYCMAWFRQAPGKEREGVA
AIHPGGGTTYYADSVKGRFSISQDSADNTLYLQMNSLKPEDTAMYYCAA
GSLWVPFGDRCAANYWGQGTQVTVSSGGGSQVQLQESGGGSVQAGGSLR
LSCTASGFTFDDSDMGWYRQAPGNECELVSTISSDGSTYYADSVKGRFT
ISQDNAKNTVYLQMNSLKPEDTAVYYCAAEPRGYYSNYGGRRECNYWGQ
GTQVTVSSASHHHHHH
> SEQ ID NO: 283; DR745(DR589-DR234)
QVQLQESGGGSVQAGGSLRLSCAASEYTASRYCMAWFRQAPGKEREGVA
AIHPGGGTTYYADSVKGRFSISQDSADNTLYLQMNSLKPEDTAMYYCAA
GSLWVPFGDRCAANYWGQGTQVTVSSGGGSQVQLQESGGGSVQAGGSLR
LSCVASGYTFSSYCMGWFRQAPGKEREGVAALGGGSTYYADSVKGRFTI
SQDNAKNTLYLQMNSLKPEDTAMYYCAAAWVACLEFGGSWYDLARYKHW
GQGTQVTVSSASHHHHHH
> SEQ ID NO: 284; DR746(DR590-DR229)
QVQLQESGGGSVQAGGSLRLSCAASGYEYCRIHMTWYRQGPGKEREFVS
SIGSDGRKTYANSVTGRFTISRDNANHTVYLQMNSLSPEDTAMYYCKTE
YLYGLGCPDGSAYWGQGTQVTVSSGGGSQVQLQESGGGLVQPGGSLRLS
CTASGFSFSSYPMTWARQAPGKGLEWVSTIASDGGSTAYAASVEGRFTI
SRDNAKSTLYLQLNSLKTEDTAMYYCTKGYGDGTPAPGQGTQVTVSSAS
HHHHHH
> SEQ ID NO: 285; DR747(DR590-DR230)
QVQLQESGGGSVQAGGSLRLSCAASGYEYCRIHMTWYRQGPGKEREFVS
SIGSDGRKTYANSVTGRFTISRDNANHTVYLQMNSLSPEDTAMYYCKTE
YLYGLGCPDGSAYWGQGTQVTVSSGGGSQVQLQESGGGLVQPGGSLRLS
CAASGFTFSSAHMSWVRQAPGKGREWIASIYSGGGTFYADSVKGRFTIS
RDNAKNTLYLQLNSLKAEDTAMYYCATNRLHYYSDDDSLRGQGTQVTVS
SASHHHHHH
> SEQ ID NO: 286; DR748(DR590-DR231)
QVQLQESGGGSVQAGGSLRLSCAASGYEYCRIHMTWYRQGPGKEREFVS
SIGSDGRKTYANSVTGRFTISRDNANHTVYLQMNSLSPEDTAMYYCKTE
YLYGLGCPDGSAYWGQGTQVTVSSGGGSQVQLQESGGGSVQAGGSLRLS
CTASGFTFDDREMNWYRQAPGNECELVSTISSDGSTYYADSVKGRFTIS
QDNAKNTVYLQMDSVKPEDTAVYYCAADFMIAIQAPGAGCWGQGTQVTV
SSASHHHHHH
> SEQ ID NO: 287; DR749(DR590-DR232)
QVQLQESGGGSVQAGGSLRLSCAASGYEYCRIHMTWYRQGPGKEREFVS
SIGSDGRKTYANSVTGRFTISRDNANHTVYLQMNSLSPEDTAMYYCKTE
YLYGLGCPDGSAYWGQGTQVTVSSGGGSQVQLQESGGGSVQAGGSLRLS
CVASGYTSCMGWFRQAPGKEREAVATIYTRGRSIYYADSVKGRFTISQD
NAKNTLYLQMNSLKPEDIAMYSCAAGGYSWSAGCEFNYWGQGTQVTVSS
ASHHHHHH
> SEQ ID NO: 288; DR750(DR590-DR233)
QVQLQESGGGSVQAGGSLRLSCAASGYEYCRIHMTWYRQGPGKEREFVS
SIGSDGRKTYANSVTGRFTISRDNANHTVYLQMNSLSPEDTAMYYCKTE
YLYGLGCPDGSAYWGQGTQVTVSSGGGSQVQLQESGGGSVQAGGSLRLS
CTASGFTFDDSDMGWYRQAPGNECELVSTISSDGSTYYADSVKGRFTIS
QDNAKNTVYLQMNSLKPEDTAVYYCAAEPRGYYSNYGGRRECNYWGQGT
QVTVSSASHHHHHH
> SEQ ID NO: 289; DR751(DR590-DR234)
QVQLQESGGGSVQAGGSLRLSCAASGYEYCRIHMTWYRQGPGKEREFVS
SIGSDGRKTYANSVTGRFTISRDNANHTVYLQMNSLSPEDTAMYYCKTE
YLYGLGCPDGSAYWGQGTQVTVSSGGGSQVQLQESGGGSVQAGGSLRLS
CVASGYTFSSYCMGWFRQAPGKEREGVAALGGGSTYYADSVKGRFTISQ
DNAKNTLYLQMNSLKPEDTAMYYCAAAWVACLEFGGSWYDLARYKHWGQ
GTQVTVSSASHHHHHH

[0269] In some embodiments, the binding proteins described herein can include one or more anti-IL2Rβ V_{H}H antibodies. When two or more anti-IL2Rβ V_{H}H antibodies are present, neighboring antibodies can be conjugated to each other by way of a linker. In some embodiments, the binding proteins described herein can include one or more anti-IL2Rγ V_{H}H antibodies. When two or more anti-IL2Rγ V_{H}H antibodies are present, neighboring antibodies can be conjugated to each other by way of a linker.

[0270] In some embodiments, the binding proteins described herein can include one or more anti-IL2Rβ V_{H}H antibodies and one or more anti-IL2Rγ V_{H}H antibodies. Neighboring antibodies can be conjugated to each other by way of a linker. In some embodiments, the number of anti-IL2Rβ V_{H}H antibodies and the number of anti-IL2Rγ V_{H}H antibodies in a binding protein are the same. In other embodiments, the number of anti-IL2Rβ V_{H}H antibodies and the number of anti-IL2Rγ V_{H}H antibodies in a binding protein are different.

[0271] In some embodiments, a binding protein described herein can be represented by the following formula:

[chemical structure]

wherein L is a linker, a, b, c are independently selected from 0 or 1, and x is an integer between 1 and 10 (e.g., 1, 2, 3, 4, 5, 6, 7, 8, 9, or 10). In some embodiments, V_{H}H #1 and V_{H}H #2 target the same receptor or subunit thereof. In some embodiments, V_{H}H #1 and V_{H}H #2 target different receptors or subunits thereof. In some embodiments, V_{H}H #1 and V_{H}H #2 can have the same sequence. In other embodiments, V_{H}H #1 and V_{H}H #2 can have different sequences.

[0272] In some embodiments, the IL2Rβ/IL2Rγ binding protein is linked to an Fc polypeptide or an Fc domain. In some embodiments, the Fc polypeptide (e.g., subunit of an Fc domain) or an Fc domain is from an IgG1, IgG2, IgG3 or IgG4. In some embodiments, the IL2Rβ/IL2Rγ binding protein is at least 90 percent (e.g., 91%, 92%, 93%, 94%, 95%, 96%, 97%, 98%, 99%, or 100%) identical to any one of SEQ ID NOS: 65-80 (Table 3), 81-106 (Table 4), or 170-289, optionally without the HHHHHH (SEQ ID NO: 127) sequence(s) therein.

### A. “Forward Orientation”

[0273] In some embodiments, the IL2R binding molecule of the present disclosure comprises a polypeptide of the structure:

[chemical structure]

[0274] wherein and L is a polypeptide linker of 1-50 amino acids and x=0 or 1, and TAG is a chelating peptide or a subunit of an Fc domain and y=0 or 1.

[0275] In some embodiments, a IL2R binding molecule of the foregoing structure comprises a polyptide from amino to carboxy terminus:
[0276] (a) an IL2Rβ sdAb comprising:
   [0277] a CDR1 having at least 90% (e.g., 91%, 92%, 93%, 94%, 95%, 96%, 97%, 98%, 99%, or 100%) sequence identity, or having 0, 1, 2, or 3 amino acid changes, optionally conservative amino acid changes relative, to the sequence of the sequence of any CDR1 in a row of Table 1;
   [0278] a CDR2 having at least 90% (e.g., 91%, 92%, 93%, 94%, 95%, 96%, 97%, 98%, 99%, or 100%) sequence identity, or having 0, 1, 2, or 3 amino acid changes, optionally conservative amino acid changes relative, to the sequence of the sequence of any CDR2 in a row of Table 1; and
   [0279] a CDR3 having at least 90% (e.g., 91%, 92%, 93%, 94%, 95%, 96%, 97%, 98%, 99%, or 100%) sequence identity, or having 0, 1, 2, or 3 amino acid changes, optionally conservative amino acid changes relative, to the sequence of the sequence of any CDR3 in a row of Table 1; or
   [0280] (A) a CDR1 comprising an amino acid sequence of SEQ ID NO: 1 or SEQ ID NO: 410, a CDR2 comprising an amino acid sequence of SEQ ID NO: 2, and CDR3 a comprising an amino acid sequence of SEQ ID NO: 3;
   [0281] (B) a CDR1 comprising an amino acid sequence of SEQ ID NO: 5 or SEQ ID NO: 411, a CDR2 comprising an amino acid sequence of SEQ ID NO: 6, and CDR3 a comprising an amino acid sequence of SEQ ID NO: 7;
   [0282] (C) a CDR1 comprising an amino acid sequence of SEQ ID NO: 9 or SEQ ID NO: 412, a CDR2 comprising an amino acid sequence of SEQ ID NO: 10, and CDR3 a comprising an amino acid sequence of SEQ ID NO: 11;
   [0283] (D) a CDR1 comprising an amino acid sequence of SEQ ID NO: 13 or SEQ ID NO: 413, a CDR2 comprising an amino acid sequence of SEQ ID NO: 14, and CDR3 a comprising an amino acid sequence of SEQ ID NO: 15;
   [0284] (E) a CDR1 comprising an amino acid sequence of SEQ ID NO: 17 or SEQ ID NO: 414, a CDR2 comprising an amino acid sequence of SEQ ID NO: 18, and CDR3 a comprising an amino acid sequence of SEQ ID NO: 19;
   [0285] (F) a CDR1 comprising an amino acid sequence of SEQ ID NO: 21 or SEQ ID NO: 415, a CDR2 comprising an amino acid sequence of SEQ ID NO: 122, and CDR3 a comprising an amino acid sequence of SEQ ID NO: 23;
   [0286] (G) a CDR1 comprising an amino acid sequence of SEQ ID NO: 25 or SEQ ID NO: 416, a CDR2 comprising an amino acid sequence of SEQ ID NO: 26, and CDR3 a comprising an amino acid sequence of SEQ ID NO: 27;
   [0287] (H) a CDR1 comprising an amino acid sequence of SEQ ID NO: 29 or SEQ ID NO: 417, a CDR2 comprising an amino acid sequence of SEQ ID NO: 30, and CDR3 a comprising an amino acid sequence of SEQ ID NO: 31;
   [0288] (I) a CDR1 comprising an amino acid sequence of SEQ ID NO: 33 or SEQ ID NO: 418, a CDR2 comprising an amino acid sequence of SEQ ID NO: 34, and CDR3 a comprising an amino acid sequence of SEQ ID NO: 35; or
   [0289] (J) a CDR1 comprising an amino acid sequence of SEQ ID NO: 37 or SEQ ID NO: 419, a CDR2 comprising an amino acid sequence of SEQ ID NO: 38, and CDR3 a comprising an amino acid sequence of SEQ ID NO: 39;
   [0290] wherein each CDR independently comprises 0, 1, 2, or 3 amino acid changes relative to the indicated sequence; and
[0291] (b) optionally, a polypeptide linker from 1-50 amino acids, alternatively 1-40 amino acids, alternatively 1-30 amino acids, alternatively 1-20 amino acids, alternatively 1-15 amino acids, alternatively 1-10 amino acids, alternatively 1-8 amino acids, alternatively 1-6 amino acids, alternatively 1-4 amino acids; and
[0292] (c) an IL2Rγ sdAb comprising:
   [0293] a CDR1 having at least 90% (e.g., 91%, 92%, 93%, 94%, 95%, 96%, 97%, 98%, 99%, or 100%) sequence identity, or having 0, 1, 2, or 3 amino acid changes, optionally conservative amino acid changes relative, to the sequence of the sequence of any CDR1 in a row of Table 2;
   [0294] a CDR2 having at least 90% (e.g., 91%, 92%, 93%, 94%, 95%, 96%, 97%, 98%, 99%, or 100%) sequence identity, or having 0, 1, 2, or 3 amino acid changes, optionally conservative amino acid changes relative, to the sequence of the sequence of any CDR2 in a row of Table 2; and
   [0295] a CDR3 having at least 90% (e.g., 91%, 92%, 93%, 94%, 95%, 96%, 97%, 98%, 99%, or 100%) sequence identity, or having 0, 1, 2, or 3 amino acid changes, optionally conservative amino acid changes relative, to the sequence of the sequence of any CDR3 in a row of Table 2; or
[0296] i) a CDR1 comprising an amino acid sequence of SEQ ID NO: 41 or SEQ ID NO: 420, a CDR2 comprising an amino acid sequence of SEQ ID NO: 42, and CDR3 a comprising an amino acid sequence of SEQ ID NO: 43;
[0297] ii) a CDR1 comprising an amino acid sequence of SEQ ID NO: 45 or SEQ ID NO: 421, a CDR2 comprising an amino acid sequence of SEQ ID NO: 46, and CDR3 a comprising an amino acid sequence of SEQ ID NO: 47;
[0298] iii) a CDR1 comprising an amino acid sequence of SEQ ID NO: 49 or SEQ ID NO: 422, a CDR2 comprising an amino acid sequence of SEQ ID NO: 50, and CDR3 a comprising an amino acid sequence of SEQ ID NO: 51;
[0299] iv) a CDR1 comprising an amino acid sequence of SEQ ID NO: 53 or SEQ ID NO: 423, a CDR2 comprising an amino acid sequence of SEQ ID NO: 54, and CDR3 a comprising an amino acid sequence of SEQ ID NO: 55;
[0300] v) a CDR1 comprising an amino acid sequence of SEQ ID NO: 57 or SEQ ID NO: 424, a CDR2 comprising an amino acid sequence of SEQ ID NO: 58, and CDR3 a comprising an amino acid sequence of SEQ ID NO: 59; or
[0301] vi) a CDR1 comprising an amino acid sequence of SEQ ID NO: 61 or SEQ ID NO: 425, a CDR2 comprising an amino acid sequence of SEQ ID NO: 62, and CDR3 a comprising an amino acid sequence of SEQ ID NO: 63;
[0302] wherein each CDR independently comprises 0, 1, 2, or 3 amino acid changes relative to the indicated sequence.

[0303] In some embodiments, the IL2R binding molecule comprises an IL2Rb sdAb comprising a CDR1, a CDR2, and a CDR3 listed in a row of Table 1, and an IL2Rγ sdAb comprising a CDR1, a CDR2, and a CDR3 as listed in a row of Table 2. In some embodiments, the IL2R binding molecule comprises an IL2Rb sdAb comprising a CDR1, a CDR2, and a CDR3 listed in a row of Table 30, and an IL2Rγ sdAb comprising a CDR1, a CDR2, and a CDR3 as listed in a row of Table 32. In some embodiments, the IL2R binding molecule comprises an IL2Rb sdAb comprising a CDR1, a CDR2, and a CDR3 listed in a row of Table 31, and an IL2Rγ sdAb comprising a CDR1, a CDR2, and a CDR3 as listed in a row of Table 33.

[0304] In some embodiments, the IL2Rb sdAb of the IL2R binding molecule comprises a sequence having at least 90% (e.g., 91%, 92%, 93%, 94%, 95%, 96%, 97%, 98%, 99%, or 100%) sequence identity to a sequence listed in a row of Table 34 or Table 35. In some embodiments, the IL2Rγ sdAb of the IL2R binding molecule comprises a sequence having at least 90% (e.g., 91%, 92%, 93%, 94%, 95%, 96%, 97%, 98%, 99%, or 100%) sequence identity to a sequence listed in a row of Table 36 or Table 37.

[0305] In some embodiments, the subunit of the Fc domain is from an IgG1, IgG2, IgG3 or IgG4. In some embodiments, the subunit of the Fc domain comprises one or more amino acid substitutions to reduce effector function, for example, the subunit of the Fc domain comprises a set of amino acid substitutions selected from the group consisting of: (a) L234A/L235A/P329A (“LALAPA”); L234A/L235A/P329G (“LALAPG”); L234A/L235E/G237A/A330S/P331 S (“AEASS”); E233P/L234V/L235A/AG237 (PVAdelG); and L234F/L235E/P33IS (“FES”). In some embodiments, the subunit of the Fc domain is modified for multimerization. In some embodiments the subunit of the Fc domain comprises an amino acid substitution at position C220 (EU numbering) of the upper hinge domain to eliminate the sulthydryl side chain. In some embodiments, the substitution at position C220 is C220S (EU numbering) substitution. In some embodiments the subunit of the Fc domain comprises amino acid substitutions in the Fc domain at positions M428 and/or N434 (EU numbering). In some embodiments the amino acid substitutions at positions M428 and/or N434 are M428L and/or N434S. In some embodiments the subunit of the Fc domain comprises amino acid deletions in the Fc domain at positions G446 and/or K447 (EU numbering).

### B. “Reverse Orientation”

[0306] In some embodiments, the IL2R binding molecule comprises a polypeptide of the structure:

[chemical structure]

[0307] wherein and L is a polypeptide linker of 1-50 amino acids and x=0 or 1, and TAG is a chelating peptide or a subunit of an Fc domain and y=0 or 1.

[0308] In some embodiments, a IL2R binding molecule of the foregoing structure comprises a polyptide from amino to carboxy terminus:
[0309] (a) an IL2Rg sdAb comprising:
   [0310] a CDR1 having at least 90% (e.g., 91%, 92%, 93%, 94%, 95%, 96%, 97%, 98%, 99%, or 100%) sequence identity, or having 0, 1, 2, or 3 amino acid changes, optionally conservative amino acid changes relative, to the sequence of the sequence of any CDR1 in a row of Table 2;
   [0311] a CDR2 having at least 90% (e.g., 91%, 92%, 93%, 94%, 95%, 96%, 97%, 98%, 99%, or 100%) sequence identity, or having 0, 1, 2, or 3 amino acid changes, optionally conservative amino acid changes relative, to the sequence of the sequence of any CDR2 in a row of Table 2; and
   [0312] a CDR3 having at least 90% (e.g., 91%, 92%, 93%, 94%, 95%, 96%, 97%, 98%, 99%, or 100%) sequence identity, or having 0, 1, 2, or 3 amino acid changes, optionally conservative amino acid changes relative, to the sequence of the sequence of any CDR3 in a row of Table 2, or
[0313] i) a CDR1 comprising an amino acid sequence of SEQ ID NO: 41 or SEQ ID NO: 420, a CDR2 comprising an amino acid sequence of SEQ ID NO: 42, and CDR3 a comprising an amino acid sequence of SEQ ID NO: 43;
[0314] ii) a CDR1 comprising an amino acid sequence of SEQ ID NO: 45 or SEQ ID NO: 421, a CDR2 comprising an amino acid sequence of SEQ ID NO: 46, and CDR3 a comprising an amino acid sequence of SEQ ID NO: 47;
[0315] iii) a CDR1 comprising an amino acid sequence of SEQ ID NO: 49 or SEQ ID NO: 422, a CDR2 comprising an amino acid sequence of SEQ ID NO: 50, and CDR3 a comprising an amino acid sequence of SEQ ID NO: 51;
[0316] iv) a CDR1 comprising an amino acid sequence of SEQ ID NO: 53 or SEQ ID NO: 423, a CDR2 comprising an amino acid sequence of SEQ ID NO: 54, and CDR3 a comprising an amino acid sequence of SEQ ID NO: 55;
[0317] v) a CDR1 comprising an amino acid sequence of SEQ ID NO: 57 or SEQ ID NO: 424, a CDR2 comprising an amino acid sequence of SEQ ID NO: 58, and CDR3 a comprising an amino acid sequence of SEQ ID NO: 59; or
[0318] vi) a CDR1 comprising an amino acid sequence of SEQ ID NO: 61 or SEQ ID NO: 425, a CDR2 comprising an amino acid sequence of SEQ ID NO: 62, and CDR3 a comprising an amino acid sequence of SEQ ID NO: 63;
[0319] wherein each CDR independently comprises 0, 1, 2, or 3 amino acid changes relative to the indicated sequence, and;
[0320] (b) optionally, a polypeptide linker from 1-50 amino acids, alternatively 1-40 amino acids, alternatively 1-30 amino acids, alternatively 1-20 amino acids, alternatively 1 amino acids, alternatively 1-10 amino acids, alternatively 1-8 amino acids, alternatively 1-6 amino acids, alternatively 1-4 amino acids; and
[0321] (c) an IL2Rb sdAb comprising:
   [0322] a CDR1 having at least 90% (e.g., 91%, 92%, 93%, 94%, 95%, 96%, 97%, 98%, 99%, or 100%) sequence identity, or having 0, 1, 2, or 3 amino acid changes, optionally conservative amino acid changes relative, to the sequence of the sequence of any CDR1 in a row of Table 1.
   [0323] CDR2 having at least 90% (e.g., 91%, 92%, 93%, 94%, 95%, 96%, 97%, 98%, 99%, or 100%) sequence identity, or having 0, 1, 2, or 3 amino acid changes, optionally conservative amino acid changes relative, to the sequence of the sequence of any CDR2 in a row of Table 1; and
   [0324] a CDR3 having at least 90% (e.g., 91%, 92%, 93%, 94%, 95%, 96%, 97%, 98%, 99%, or 100%) sequence identity, or having 0, 1, 2, or 3 amino acid changes, optionally conservative amino acid changes relative, to the sequence of the sequence of any CDR3 in a row of Table 1; or
   [0325] (A) a CDR1 comprising an amino acid sequence of SEQ ID NO: 1 or SEQ ID NO: 410, a CDR2 comprising an amino acid sequence of SEQ ID NO: 2, and CDR3 a comprising an amino acid sequence of SEQ ID NO: 3;
   [0326] (B) a CDR1 comprising an amino acid sequence of SEQ ID NO: 5 or SEQ ID NO: 411, a CDR2 comprising an amino acid sequence of SEQ ID NO: 6, and CDR3 a comprising an amino acid sequence of SEQ ID NO: 7;
   [0327] (C) a CDR1 comprising an amino acid sequence of SEQ ID NO: 9 or SEQ ID NO: 412, a CDR2 comprising an amino acid sequence of SEQ ID NO: 10, and CDR3 a comprising an amino acid sequence of SEQ ID NO: 11;
   [0328] (D) a CDR1 comprising an amino acid sequence of SEQ ID NO: 13 or SEQ ID NO: 413, a CDR2 comprising an amino acid sequence of SEQ ID NO: 14, and CDR3 a comprising an amino acid sequence of SEQ ID NO: 15;
   [0329] (E) a CDR1 comprising an amino acid sequence of SEQ ID NO: 17 or SEQ ID NO: 414, a CDR2 comprising an amino acid sequence of SEQ ID NO: 18, and CDR3 a comprising an amino acid sequence of SEQ ID NO: 19;
   [0330] (F) a CDR1 comprising an amino acid sequence of SEQ ID NO: 21 or SEQ ID NO: 415, a CDR2 comprising an amino acid sequence of SEQ ID NO: 122, and CDR3 a comprising an amino acid sequence of SEQ ID NO: 23;
   [0331] (G) a CDR1 comprising an amino acid sequence of SEQ ID NO: 25 or SEQ ID NO: 416, a CDR2 comprising an amino acid sequence of SEQ ID NO: 26, and CDR3 a comprising an amino acid sequence of SEQ ID NO: 27;
   [0332] (H) a CDR1 comprising an amino acid sequence of SEQ ID NO: 29 or SEQ ID NO: 417, a CDR2 comprising an amino acid sequence of SEQ ID NO: 30, and CDR3 a comprising an amino acid sequence of SEQ ID NO: 31;
   [0333] (I) a CDR1 comprising an amino acid sequence of SEQ ID NO: 33 or SEQ ID NO: 418, a CDR2 comprising an amino acid sequence of SEQ ID NO: 34, and CDR3 a comprising an amino acid sequence of SEQ ID NO: 35; or
   [0334] (J) a CDR1 comprising an amino acid sequence of SEQ ID NO: 37 or SEQ ID NO: 419, a CDR2 comprising an amino acid sequence of SEQ ID NO: 38, and CDR3 a comprising an amino acid sequence of SEQ ID NO: 39;
   [0335] wherein each CDR independently comprises 0, 1, 2, or 3 amino acid changes relative to the indicated sequence.

[0336] In some embodiments, the binding molecule comprises an IL2Rg sdAb comprising a CDR1, a CDR2, and a CDR3 as listed in a row of Table 2, and the IL2Rb sdAb and a CDR1, a CDR2, and a CDR3 as listed in a row of Table 1. In some embodiments, the IL2R binding molecule comprises an IL2Rγ sdAb comprising a CDR1, a CDR2, and a CDR3 as listed in a row of Table 32, and an IL2Rb sdAb comprising a CDR1, a CDR2, and a CDR3 listed in a row of Table 30. In some embodiments, the IL2R binding molecule comprises an IL2Rγ sdAb comprising a CDR1, a CDR2, and a CDR3 as listed in a row of Table 33, and an IL2Rb sdAb comprising a CDR1, a CDR2, and a CDR3 listed in a row of Table 31.

[0337] In some embodiments, the IL2Rg sdAb comprises a sequence having at least 90% (e.g., 91%, 92%, 93%, 94%, 95%, 96%, 97%, 98%, 99%, or 100%) sequence identity to a sequence listed in a row of Table 36 or Table 37. In some embodiments, the IL2Rb sdAb comprises a sequence having at least 90% (e.g., 91%, 92%, 93%, 94%, 95%, 96%, 97%, 98%, 99%, or 100%) sequence identity to a sequence listed in a row of Table 34 or Table 35.

[0338] In some embodiments, the subunit of the Fc domain is from an IgG1, IgG2, IgG3 or IgG4. In some embodiments, the subunit of the Fc domain comprises one or more amino acid substitutions to reduce effector function, for example, the subunit of the Fc domain comprises a set of amino acid substitutions selected from the group consisting of: (a) L234A/L235A/P329A (“LALAPA”); L234A/L235A/P329G (“LALAPG”); L234A/L235E/G237A/A330S/P331 S (“AEASS”); E233P/L234V/L235A/hG237 (PVAdelG); and L234F/L235E/P331S (“FES”). In some embodiments, the subunit of the Fc domain is modified for multimerization. In some embodiments the subunit of the Fc domain comprises an amino acid substitution at position C220 (EU numbering) of the upper hinge domain to eliminate the sulthydryl side chain. In some embodiments, the substitution at position C220 is C220S (EU numbering) substitution. In some embodiments the subunit of the Fc domain comprises amino acid substitutions in the Fc domain at positions M428 and/or N434 (EU numbering). In some embodiments the amino acid substitutions at positions M428 and/or N434 are M428L and/or N434S. In some embodiments the subunit of the Fc domain comprises amino acid deletions in the Fc domain at positions G446 and/or K447 (EU numbering).

### IV. Single-Domain Antibody and V_{H}H

[0339] A single-domain antibody (sdAb) is an antibody containing a single monomeric variable antibody domain. Like a full-length antibody, it is able to bind selectively to a specific antigen. The complementary determining regions (CDRs) of sdAbs are within a single-domain polypeptide. Single-domain antibodies can be engineered from heavy-chain antibodies found in camelids, which are referred to as V_{H}Hs. Cartilaginous fishes also have heavy-chain antibodies (IgNAR, “immunoglobulin new antigen receptor”), from which single-domain antibodies referred to as VNARS can be obtained. The dimeric variable domains from common immunoglobulin G (IgG) from humans or mice can also be split into monomers to make sdAbs. Although most research into sdAbs is currently based on heavy chain variable domains, sdAbs derived from light chains have also been shown to bind specifically to target, see, e.g., Moller et al., J Biol Chem. 285(49):38348-38361, 2010. In some embodiments, a sdAb is composed of a single monomeric light chain variable antibody domain.

[0340] A sdAb can be a heavy chain antibody (V_{H}H). A V_{H}H is a type of sdAb that has a single monomeric heavy chain variable antibody domain. Similar to a traditional antibody, a V_{H}H is able to bind selectively to a specific antigen. A binding protein described herein can include two V_{H}Hs (e.g., V_{H}H²) joined together by a linker (e.g., a peptide linker). The binding protein can be a bispecific V_{H}H² that includes a first V_{H}H binding to a first receptor or domain or subunit thereof and a second V_{H}H binding to a second receptor or domain or subunit thereof, in which the two V_{H}Hs are joined by a linker.

[0341] An exemplary V_{H}H has a molecular weight of approximately 12-15 kDa which is much smaller than traditional mammalian antibodies (150-160 kDa) composed of two heavy chains and two light chains. V_{H}Hs can be found in or produced from Camelidae mammals (e.g., camels, llamas, dromedary, alpaca, and guanaco) which are naturally devoid of light chains. Descriptions of sdAbs and V_{H}Hs can be found in, e.g., De Greve et al., Curr Opin Biotechnol. 61:96-101, 2019; Ciccarese, et al., Front Genet. 10:997, 2019; Chanier and Chames, Antibodies (Basel) 8(1), 2019; and De Vlieger et al., Antibodies (Basel) 8(1), 2018.

[0342] To prepare a binding protein that is a bispecific V_{H}H², in some embodiments, the two V_{H}Hs can be synthesized separately, then joined together by a linker. Alternatively, the bispecific V_{H}H² can be synthesized as a fusion protein. V_{H}Hs having different binding activities and receptor targets can be paired to make a bispecific V_{H}H². The binding proteins can be screened for signal transduction on cells carrying one or both relevant receptors.

### V. Linkers

[0343] As previously described, the binding domains of the dimeric binding proteins of the present disclosure may be joined contiguously (e.g., the C-terminal amino acid of the first V_{H}H in the binding protein to the N-terminal amino acid of the second V_{H}H in the binding protein) or the binding domains of the binding protein may optionally be joined via a linker. A linker is a linkage between two elements, e.g., protein domains. In a bispecific V_{H}H² binding protein described herein, a linker is a linkage between the two V_{H}Hs in the binding protein. A linker can be a covalent bond or a peptide linker. In some embodiments, the two V_{H}Hs in a binding protein are joined directly (i.e., via a covalent bond). The length of the linker between two V_{H}Hs in a binding protein can be used to modulate the proximity of the two V_{H}Hs of the binding protein. By varying the length of the linker, the overall size and length of the binding protein can be tailored to bind to specific cell receptors or domains or subunits thereof. For example, if the binding protein is designed to bind to two receptors or domains or subunits thereof that are located close to each other on the same cell, then a short linker can be used. In another example, if the binding protein is designed to bind to two receptors or domains or subunits there of that are located on two different cells, then a long linker can be used.

[0344] In some embodiments, the linker is a peptide linker. A peptide linker can include between 1 and 50 amino acids (e.g., between 2 and 50, between 5 and 50, between 10 and 50, between 15 and 50, between 20 and 50, between 25 and 50, between 30 and 50, between 35 and 50, between 40 and 50, between 45 and 50, between 2 and 45, between 2 and 40, between 2 and 35, between 2 and 30, between 2 and 25, between 2 and 20, between 2 and 15, between 2 and 10, between 2 and 5 amino acids). A linker can also be a chemical linker, such as a synthetic polymer, e.g., a polyethylene glycol (PEG) polymer.

[0345] In some embodiments, a linker joins the C-terminus of the first V_{H}H in the binding protein to the N-terminus of the second V_{H}H in the binding protein. In other embodiments, a linker joins the C-terminus of the second V_{H}H in the binding protein to the N-terminus of the first V_{H}H in the binding protein.

[0346] Suitable peptide linkers are known in the art, and include, for example, peptide linkers containing flexible amino acid residues such as glycine and serine. In certain embodiments, a peptide linker can contain motifs, e.g., multiple or repeating motifs, of GS, GGS, GGGS (SEQ ID NO: 107), GGGGS (SEQ ID NO: 108), GGGGGS (SEQ ID NO: 109), GGSG (SEQ ID NO: 110), or SGGG (SEQ ID NO: 111). In certain embodiments, a peptide linker can contain 2 to 12 amino acids including motifs of GS, e.g., GS, GSGS (SEQ ID NO: 112), GSGSGS (SEQ ID NO: 113), GSGSGSGS (SEQ ID NO: 114), GSGSGSGSGS (SEQ ID NO: 115), or GSGSGSGSGSGS (SEQ ID NO: 116). In certain other embodiments, a peptide linker can contain 3 to 12 amino acids including motifs of GGS, e.g., GGS, GGSGGS (SEQ ID NO: 117), GGSGGSGGS (SEQ ID NO: 118), and GGSGGSGGSGGS (SEQ ID NO: 119). In yet other embodiments, a peptide linker can contain 4 to 20 amino acids including motifs of GGSG (SEQ ID NO: 110), e.g., GGSGGGSG (SEQ ID NO: 120), GGSGGGSGGGSG (SEQ ID NO: 121), GGSGGGSGGGSGGGSG (SEQ ID NO: 122), or GGSGGGSGGGSGGGSGGGSG (SEQ ID NO: 123). In other embodiments, a peptide linker can contain motifs of GGGGS (SEQ ID NO: 108), e.g., GGGGSGGGGS (SEQ ID NO: 124) or GGGGSGGGGSGGGGS (SEQ ID NO: 125).

### VI. Modifications to Extend Duration of Action In Vivo

[0347] The binding proteins described herein can be modified to provide for an extended lifetime in vivo and/or extended duration of action in a subject. In some embodiments, the binding protein can be conjugated to carrier molecules to provide desired pharmacological properties such as an extended half-life. In some embodiments, the binding protein can be covalently linked to the Fc domain of IgG, albumin, or other molecules to extend its half-life, e.g., by pegylation, glycosylation, and the like as known in the art.

[0348] In some embodiments, the binding protein is conjugated to an Fc polypeptide or an Fc domain (a dimer of two Fc polypeptides), optionally comprising an intervening linker. Fc fusion conjugates have been shown to increase the systemic half-life of biopharmaceuticals, and thus the biopharmaceutical product can require less frequent administration. Fc binds to the neonatal Fc receptor (FcRn) in endothelial cells that line the blood vessels, and, upon binding, the Fc fusion molecule is protected from degradation and re-released into the circulation, keeping the molecule in circulation longer. This Fc binding is believed to be the mechanism by which endogenous IgG retains its long plasma half-life. More recent Fc-fusion technology links a single copy of a biopharmaceutical to the Fc region of an antibody to optimize the pharmacokinetic and pharmacodynamic properties of the biopharmaceutical as compared to traditional Fc-fusion conjugates. The Fc polypeptide or Fc domain useful in the preparation of Fc fusions can be a naturally occurring or synthetic polypeptide that is homologous to an IgG C-terminal domain produced by digestion of IgG with papain. IgG Fc has a molecular weight of approximately 50 kDa. The binding protein described herein can be conjugated to the entire Fc polypeptide or Fc domain, or a smaller portion that retains the ability to extend the circulating half-life of a chimeric polypeptide of which it is a part. In addition, full-length or fragmented Fc polypeptide can be variants of the wild-type molecule. In a typical presentation, each Fc polypeptide in an Fc domain can carry a heterologous polypeptide; the two heterologous polypeptides in the Fc domain being the same or different (e.g., one fused to an anti-IL-2β V_{H}H antibody and the other fused to an anti-IL-2Ry V_{H}H antibody or one or both heterologous polypeptides linked to a anti-IL-2β V_{H}H antibody/anti-IL2Rγ V_{H}H antibody dimer polypeptide).

[0349] In some embodiments the present disclosure provides a heterodimeric Fc comprising at least one anti-IL-2β V_{H}H antibody and at least one anti-IL2Rγ V_{H}H antibody, wherein anti-IL-2β V_{H}H antibody/Fc fusion and an anti-IL2Rγ V_{H}H antibody/Fc fusion polypeptides of the heterodimeric Fc are covalently linked via one disulfide bond, optionally two disulfide bonds, optionally three disulfide bonds, or optionally four disulfide bonds. In some embodiments, the anti-IL-2β V_{H}H antibody/FC fusion and an anti-IL2Rγ V_{H}H antibody/Fc fusion polypeptides are covalently linked via a disulfide bond between the sulfhydryl group of amino acid C226 of the lower hinge domain of the anti-IL-2β V_{H}H antibody/Fc fusion and the sulfhydryl group of amino acid C226 of the lower hinge domain of the anti-IL2Rγ V_{H}H antibody/Fc fusion. In some embodiments, the two fusions are covalently linked via a disulfide bond between the sulfhydryl group of amino acid C229 of the lower hinge domain of the anti-IL-2β V_{H}H antibody/Fc fusion and the sulfhydryl group of amino acid C229 of the lower hinge domain of the anti-IL2Rγ V_{H}H antibody/Fc fusion. In some embodiments, a first Fc domain comprises the amino acid substitution S354C, and the second Fc domain comprises the amino acid substitution Y349C. In some embodiments, the heterodimeric Fc comprises a first Fc domain comprising the amino acid substitution S354C and the second Fc domain comprising the amino acid substitution Y349C and wherein the fusions are linked via a disulfide bond between the S354C of the first Fc domain and Y349C of the second Fc domain. In some embodiments, the two polypeptides of the heterodimeric Fc are covalently linked via one or more, optionally two or more optionally three or more disulfide bonds, optionally four or more disulfide bonds between the side chains of the following groups of cystine pairs: (a) C96 of the first Fc fusion and C199 of the second Fc fusion; (b) between C226 of the first Fc fusion and the C226 of the second Fc fusion, (c) between C229 of the first Fc fusion and the C229 of the second Fc fusion; and (d) between S354C of the first Fc fusion comprising a S354C amino acid substitution and Y349C of the second Fc fusion comprising a Y349C amino acid substitution.

[0350] In some embodiments the present disclosure provides a heterodimeric Fc wherein either or both of the fusion subunits of the heterodimeric Fc comprise one or more amino acid substitutions to reduce effector function. In some embodiments, the fusion polypeptides comprise a set of amino acid substitutions selected from the group consisting of: (a) L234A/L235A/P329A (“LALAPA”); L234A/L235A/P329G (“LALAPG”); L234A/L235E/G237A/A330S/P331S (“AEASS”); E233P/L234V/L235A/AG237 (PVAde1G); and L234F/L235E/P331S (“FES”).

[0351] In some embodiments the present disclosure provides a heterodimeric Fc wherein either or both of the fusion subunits of the heterodimeric Fc comprises an amino acid substitution at position C220 (EU numbering) of the upper hinge domain to eliminate the sulfhydryl side chain. In some embodiments, the substitution at position C220 is C220S (EU numbering) substitution.

[0352] In some embodiments the present disclosure provides a heterodimeric Fc wherein either or both of the fusion subunits of the heterodimeric Fc comprises amino acid substitutions in the Fc domain at positions M428 and/or N434 (EU numbering). In some embodiments the amino acid substitutions at positions M428 and/or N434 are M428L and/or N434S.

[0353] In some embodiments the present disclosure provides a heterodimeric Fc wherein either or both of the fusion subunits of the heterodimeric Fc comprises amino acid deletions in the Fc domain at positions G446 and/or K447 (EU numbering).

[0354] In one embodiment, the Fc domain is an Fc domain that is derived from human IgG4 heavy constant region (UniProt Reference PO1861). The use of hIgG4 as the source of the Fc provides advantages such very low FcgR binding thereby reducing the necessity of mutations immunogenicity or effector function. In some embodiments, when hIgG4 is employed as the source of the Fc domain, the hIgG4 Fc may comprise the amino acid substitution S228P (EU numbering) which is useful to stabilize the Fc dimer. Additionally, or alternatively, the hIgG4 Fc may comprise the amino acid substitution N297G (EU numbering) which reduces FcgR binding. Additionally, or alternatively, the may comprise the a deletion of the C-terminal lysine residue (K447del) (EU numbering) which reduces FcgR binding.

[0355] In one embodiment, the present disclosure provides a homodimeric binding protein comprised of two of the same IL2Rb/IL2Rg dimeric binding molecules (H1, DR240-G3S-DR231) each attached via an AS linker to a domain of an hIgG4 Fc (comprising the hIgG4 hinge, CH2 and CH3 domains derived from the human IgG4 heavy constant region UniProt Reference P01861) containing the amino acid substitutions S228P and N297G and the deletion of K447 having the amino acid sequence, the IgG4 Fc/S228P/N297G/K447 del having the sequence:

(SEQ ID NO: 792)
RVESKYGPPCPPCPAPEFLGGPSVFLFPPKPKDTLMISRTPEVTCVVVDV
SQEDPEVQFNWYVDGVEVHNAKTKPREEQFGSTYRVVSVLTVLHQDWLNG
KEYKCKVSNKGLPSSIEKTISKAKGQPREPQVYTLPPSQEEMTKNQVSLT
CLVKGFYPSDIAVEWESNGQPENNYKTTPPVLDSDGSFFLYSRLTVDKSR
WQEGNVFSCSVMHEALHNHYTQKSLSLSLG.

[0356] Alternatively, the wild-type human IgG4 Fc (hIgG4 hinge-CH2-CH3) may be employed which has the amino acid sequence:

(SEQ ID NO: 793)
RVESKYGPPCPSCPAPEFLGGPSVFLFPPKPKDTLMISRTPEVTCVVVDV
SQEDPEVQFNWYVDGVEVHNAKTKPREEQFNSTYRVVSVLTVLHQDWLNG
KEYKCKVSNKGLPSSIEKTISKAKGQPREPQVYTLPPSQEEMTKNQVSLT
CLVKGFYPSDIAVEWESNGQPENNYKTTPPVLDSDGSFFLYSRLTVDKSR
WQEGNVFSCSVMHEALHNHYTQKSLSLSLGK.

[0357] In some embodiments the present disclosure provides a heterodimeric Fc wherein either or both of the fusion subunits of the heterodimeric Fc are PEGylated. In some embodiments, either or both of the fusion subunits are PEGylated via the sulthydryl side chain of amino acid C220 of the upper hinge.

[0358] In some embodiments, the present disclosure provides an expression cassette encoding a heterodimeric Fc comprising a nucleic acid sequence encoding anti-IL-2β V_{H}H antibody/Fc fusion and an anti-IL2Rγ V_{H}H antibody/Fc fusion polypeptides operably linked to one or more heterologous nucleic acid sequences, wherein the nucleic acid sequences encoding the anti-IL-2β V_{H}H antibody/Fc fusion and an anti-IL2Rγ V_{H}H antibody/Fc fusion polypeptides are: (a) under the control a single promoter and (b) are linked via an intervening sequence that facilitates co-expression. In some embodiments wherein the nucleic acid sequences encoding the anti-IL-2β V_{H}H antibody/Fc fusion and an anti-IL2Rγ V_{H}H antibody/Fc fusion polypeptides are linked via an intervening sequence that facilitates co-expression, the nucleic acid sequence encoding the anti-IL-2β V_{H}H antibody/Fc fusion polypeptide is 5′ relative to the nucleic acid sequence encoding the anti-IL2Rγ V_{H}H antibody/Fc fusion polypeptide. In some embodiments wherein the nucleic acid sequences encoding the anti-IL-2β V_{H}H antibody/Fc fusion and an anti-IL2Rγ V_{H}H antibody/Fc fusion polypeptides are linked via an intervening sequence that facilitates co-expression, the nucleic acid sequence encoding the anti-IL2Rγ V_{H}H antibody/Fc fusion polypeptide is 5′ relative to the nucleic acid sequence encoding the anti-IL-2β V_{H}H antibody/Fc fusion polypeptide. In some embodiments, the intervening sequence to facilitate co-expression is an IRES element or a T2A sequence.

[0359] In some embodiments, the present disclosure provides an expression cassette encoding a heterodimeric Fc comprising a nucleic acid sequence encoding anti-IL-2β V_{H}H antibody/Fc fusion and an anti-IL2Rγ V_{H}H antibody/Fc fusion polypeptides operably linked to one or more heterologous nucleic acid sequences, wherein the nucleic acid sequences encoding the anti-IL-2β V_{H}H antibody/Fc fusion and an anti-IL2Rγ V_{H}H antibody/Fc fusion polypeptides are: (a) under the control a single promoter and (b) are linked via an intervening sequence that facilitates co-expression in a mammalian cell.

[0360] The present disclosure further provides a recombinant vector encoding a heterodimeric Fc, the vector comprising a first expression cassette encoding an anti-IL-2β V_{H}H antibody/Fc fusion polypeptide and a second expression cassette comprising a nucleic acid sequence encoding a anti-IL2Rγ V_{H}H antibody/Fc fusion polypeptide. In some embodiments, the vector is viral vector. In some embodiments, the vector is non-viral vector.

[0361] Further provided is a recombinantly modified cell comprising a nucleic acid molecule or vector of the disclosure. In some embodiments, the cell is a prokaryotic cell, such as a bacterial cell. In some embodiments, the cell is a eukaryotic cell, such as a mammalian cell. Also provided is a cell culture comprising at least one recombinantly modified cell of the disclosure, and a culture medium.

[0362] In some embodiments, the recombinantly modified cell is transformed with a recombinant vector encoding a heterodimeric Fc, the vector comprising a first expression cassette encoding an anti-IL2Rγ V_{H}H antibody/Fc fusion polypeptide and a second expression cassette comprising a nucleic acid sequence encoding an anti-IL-2β V_{H}H antibody/Fc fusion polypeptide. In some embodiments, the recombinantly modified cell is transformed with a recombinant vector encoding a heterodimeric Fc, the vector comprising a first expression cassette encoding an anti-IL-2β V_{H}H antibody/Fc fusion polypeptide and a second expression cassette comprising a nucleic acid sequence encoding a anti-IL2Rγ V_{H}H antibody/Fc fusion polypeptide.

[0363] In some embodiments, the recombinantly modified cell is transformed with a first vector comprising a nucleic acid sequence encoding a anti-IL2Rγ V_{H}H antibody/Fc fusion polypeptide operably linked to one or more expression control sequences and a second vector comprising an expression cassette comprising a nucleic acid sequence encoding a anti-IL-2β V_{H}H antibody/Fc fusion polypeptide operably linked to one or more expression control sequences. In some embodiments, the recombinantly modified cell is transformed with a first vector comprising a nucleic acid sequence encoding a anti-IL-213 V_{H}H antibody/Fc fusion polypeptide operably linked to one or more expression control sequences and a second vector comprising an expression cassette comprising a nucleic acid sequence encoding a anti-IL2Rγ V_{H}H antibody/Fc fusion polypeptide operably linked to one or more expression control sequences. In some embodiments, the cell is a prokaryotic cell, such as a bacterial cell. In some embodiments, the cell is a eukaryotic cell, such as a mammalian cell. Also provided is a cell culture comprising at least one recombinantly modified cell of the disclosure, and a culture medium.

[0364] The present disclosure further provides methods for the recombinant production, isolation, purification and characterization of a heterodimeric Fc. Thus, provided herein is a method for producing a heterodimeric Fc of the disclosure. In some embodiments, the method comprises a) providing one or more recombinantly modified cells comprising a nucleic acid molecule or vector comprising a nucleic acid sequence encoding a heterodimeric Fc as disclosed herein; and b) culturing the one or more cells in a culture medium such that the cells produce the heterodimeric Fc encoded by the nucleic acid sequence.

[0365] Also provided is a pharmaceutical composition comprising a heterodimeric Fc of the present disclosure. In some embodiments, the pharmaceutical composition comprises a heterodimeric Fc of the present disclosure and a pharmaceutically acceptable carrier. In some embodiments, the pharmaceutical composition comprises a nucleic acid molecule or vector of the disclosure. In some embodiments, the pharmaceutical composition comprises a recombinantly modified cell of the disclosure. In some embodiments, the recombinantly modified cell is a mammalian cell.

[0366] The present disclosure provides a heterodimeric Fc, the heterodimeric Fc comprising a first polypeptide of the formula #1:

[chemical structure]

and a second polypeptide of the formula #2:

[chemical structure]

wherein:
[0367] L1 and L2 are GSA linkers and a and b are independently selected from 0 (absent) or 1 (present);
[0368] UH1 and UH2 are each an upper hinge domain of human immunoglobulin independently selected from the group consisting of the IgG1, IgG2, IgG3 and IgG4 upper hinge, optionally comprising the amino acid substitution C220S (EU numbering);
[0369] Fc1 is a polypeptide comprising the lower hinge, CH2 and CH3 domains of a human immunoglobulin selected from the group consisting of IgG1, IgG2, IgG3 and IgG4, comprising one or more amino acid substitutions promote heterodimerization with Fc2, and
[0370] FC2 is a polypeptide comprising the lower hinge, CH2 and CH3 domains of a human immunoglobulin selected from the group consisting of IgG1, IgG2, IgG3 and IgG4, comprising one or more amino acid substitutions promote heterodimerization with Fc1, and wherein the polypeptide of formula 1 and the polypeptide of formula 2 are linked by at least one interchain disulfide bond.

### Upper Hinge:

[0371] The heterodimeric Fcs of the present disclosure are heterodimers comprising polypeptides of the formulae [1] and [2], which each incorporate an upper hinge region of a human immunoglobulin molecule. The term “upper hinge” or “UH” refers to an amino acid sequence corresponding to amino acid residues 216-220 (EU numbering) of a human immunoglobulin molecule. In some embodiments, the upper hinge region is a naturally occurring upper hinge region of a human immunoglobulin selected from the LH regions of human IgG1, human IgG2, human IgG3 and human IgG4 upper hinge domains. In some embodiments, the upper hinge region is the upper hinge region of a human IgG1 immunoglobulin. In some embodiments, the upper hinge region is the upper hinge region of a human IgG1 immunoglobulin comprising the pentameric amino acid sequence: EPKSC (SEQ ID NO: 794).

[0372] In some embodiments, the upper hinge region contains an unpaired cysteine residue at position 220 (EU numbering) that typically, in a complete immunoglobulin molecule, binds to a cysteine on a light chain. When only the Fc domain is used comprising the hinge domain, the unpaired cysteine in the hinge domain creates the potential of the formation of improper disulfide bonds. Consequently, in some embodiments the cysteine at position 220 (C220, numbered in accordance with EU numbering) is substituted with an amino acid that does not promote disulfide bonding. In some embodiments, the Fc domain comprises a C220S mutation having the amino acid sequence EPKSS (SEQ ID NO: 795).

### Fc1 and Fc2:

[0373] The heterodimeric Fcs of the present disclosure are heterodimers comprising polypeptides of the formulae [1] and [2], which each incorporate an Fc region (Fc1 and Fc2) of a human immunoglobulin molecule modified to promote heterodimerization.

[0374] As used herein the term “Fc” and “Fc monomer” are used interchangeably herein to designate the monomeric polypeptide subunit of an Fc dimer. An Fc comprises an amino acid sequence (from amino to carboxy terminal) comprising a lower hinge domain and the CH2 and CH3 domains of a human immunoglobulin molecule. In some embodiments, the Fc monomer is a polypeptide comprising the lower hinge domain and the CH2 and CH3 domains of a human immunoglobulin molecule domains of human IgG1, human IgG2, human IgG3 and human IgG4 hinge domains. The CH2 domain of hIgG1 corresponds to amino acid residues 231-340 (EU numbering) and is provided as SEQ ID NO: 14. The CH3 domain of hIgG1 corresponds to amino acid residues 341-447(EU numbering).

[0375] The polypeptides of the formulae [1] and [2] each incorporate a lower hinge region of a human immunoglobulin. As used herein, the term “lower hinge” or “LH” refers to an amino acid sequence corresponding to amino acid residues 221-229 (EU numbering) of a human immunoglobulin molecule. In some embodiments, the lower hinge region is a naturally occurring lower hinge region of a human immunoglobulin selected from the LH regions of IgG1, IgG2, IgG3 and IgG4 lower hinge domains. In some embodiments, the lower hinge region is the lower hinge region of a human IgG1 immunoglobulin. In some embodiments, the lower hinge region is the lower hinge region of a human IgG1 immunoglobulin comprising the decameric amino acid sequence: DKTHTCPPCP (SEQ ID NO: 796).

[0376] In some embodiments, Fc1 and Fc2 are derived from a polypeptide corresponding to amino acids 221-447 (EU numbering) of the human IgG1 immunoglobulin having the amino acid sequence (EU numbering indicated:

```
(SEQ ID NO: 797)
              230 240 250 260 270
DKTHTCPPCP APELLGGPSV FLFPPKPKDT LMISRTPEVT CVVVDVSHED
              280 290 300 310 320
PEVKFNWYVD GVEVHNAKTK PREEQYNSTY RVVSVLTVLH QDWLNGKEYK
              330 340 350 360 370
CKVSNKALPA PIEKTISKAK GQPREPQVYT LPPSRDELTK NQVSLTCLVK
              380 390 400 410 420
GFYPSDIAVE WESNGQPENN YKTTPPVLDS DGSFFLYSKL TVDKSRWQQG
              430 440 447
NVFSCSVMHE ALHNHYTQKS LSLSPGK
```

[0377] As indicated in above sequence, the C-terminal residue of the wild-type form of the IgG1 Fc domain is a lysine, referred to as K447 in accordance with EU numbering. The K447 is inconsistently removed by the producer cell during recombinant product. As a result, the population of recombinant Fc monomers may be heterogenous in that some fraction of the recombinantly produced Fc monomers will contain K447 and others will not. Such inconsistent proteolytic processing by producer cells may therefore result in a heterogenous population of Fcs. Typically, particularly in the context of human pharmaceutical agents, such heterogeneity of the active pharmaceutical ingredient is to be avoided. Consequently, in addition to modifications to the Fc monomer sequence promote heterodimerization, the present disclosure provides Fc monomers that further comprising a deletion of the C-terminal K447 or a deletion of G446 and K447 and nucleic acid sequences encoding Fc monomers comprising a: (a) a deletion of the lysine residue at position 447 (K447, EU numbering, abbreviated as ΔK447 or des-K447), or (b) deletion of both the glycine at position 456 (G446 EU numbering, abbreviated as des-G446) and K447 (this double deletion of G446 and K447 being referred to herein as des-G446/des-K447 or ΔG446/ΔK447).

### Modifications of Fc Subunits to Promote Heterodimerization

[0378] As provided in formulae [1] and [2] above, the Fc1 and Fc2 monomers of the dimeric Fc contain amino acid substitutions that promote heterodimerization between Fc1 and Fc2. A variety of techniques are established for the promotion of heterodimerization of Fc domains. See, e.g. Gillies, et al. United States Patent No. Kim, et al., U.S. patent Ser. No. 11/087,249, issued Aug. 3, 2021. In some embodiments, the modifications to promoter heterodimerization of the Fc1 and Fc2 monomers are the HF-TA mutations and the HA-TF mutations as described in Moore, et al (2011) mAbs 3(6):546-557. The HF-TA method employs the S364H/T394F substitutions on one Fc monomer and the Y349T/F405A substitutions on the complementary Fc monomer. The (HA-TF) method employs the S364H/F405A substitutions on one Fc monomer and the Y349T/T394F substitutions on the complementary Fc monomer. Alternatively, the Fc1 and Fc2 monomers are modified to promote heterodimerization by the ZW1 heterodimerization method which employs the T350V/L351Y/F405A/Y407V substitutions on one Fc monomer and the T350V/T366L/K392L/T394W substitutions on the complementary Fc monomer. Von Kreudenstein, et al (2013) mAbs, 5(5):646-654. Alternatively, the Fc1 and Fc2 monomers are modified to promote heterodimerization by the EW-RVT heterodimerization method which employs the K360E/K409W substitutions on one Fc monomer and the Q347R/D399V/F405T substitutions on the complementary Fc monomer. Choi, et al (2015) Molecular Immunology 65(2):377-83.

[0379] In one embodiment, Fc1 and Fc2 are modified to promote heterodimerization by the employment of the “knob-into-hole” (abbreviated KiH) modification as exemplified herein. The KiH modification comprises one or more amino acid substitutions in a first Fc monomer (e.g. Fc1) that create a bulky “knob” domain on a first Fc and one or more amino acid substitutions on a second Fc monomer (e.g. Fc2) that create a complementary pocket or “hole” to receive the “knob” of the first Fc monomer.

[0380] A variety of amino acid substitutions have been established for the creation of complementary knob and hole Fc monomers. See, e.g. Ridgway, et al (1996) Protein Engineering 9(7):617-921; Atwell, et al (1997) J. Mol. Biol. 270:26-35; Carter, et al. U.S. Pat. No. 5,807,706 issued Sep. 15, 1998; Carter, et al U.S. Pat. No. 7,695,936 issued Apr. 13, 2010; Zhao et al. “A new approach to produce IgG4-like bispecific antibodies,” Scientific Reports 11: 18630 (2021); Cao et al. “Characterization and Monitoring of a Novel Light-heavy-light Chain Mispair in a Therapeutic Bispecific Antibody,” and Liu et al. “Fc Engineering for Developing Therapeutic Bispecific Antibodies and Novel Scaffolds”. Frontiers in Immunology. 8: 38. doi:10.3389/fimmu.2017.00038 (2017).

[0381] In some embodiments, the Fc domain comprises two Fc monomers wherein the CH3 domain of a first Fc monomer wherein the threonine at (EU numbering) position 366 is modified with a bulky residue (e.g. a T366W) create a “knob” and the substitution, and a second Fc monomer comprising one or more substitutions in complementary residues of the CH3 domain of the second Fc monomer to create a pocket or “hole” to receive the bulky residue, for example by amino acid substitutions such as T366S, L368A, and/or Y407V.

[0382] In one embodiment, the Fc1 monomer of formula 1 is a “knob” modified Fc monomer comprising the amino acid substitution T366W and the Fc2 monomer of formula 2 is a “hole” modified Fc comprising the set of amino acid substitutions T366S/L368A/Y407V.

[0383] Alternatively, the Fc1 monomer of formula 1 is a “hole” modified Fc monomer comprising the set of amino acid substitutions T366S/L368A/Y407V and the Fc2 monomer of formula 2 is a “knob” modified Fc monomer comprising the amino acid substitution T366W.

[0384] An example of an engineered Fc heterodimeric pair comprising complementary KiH modifications is provided in the Table below:

TABLE
Amino Acid Substitution Sets of Complementary
IgG1 KiH Heterodimeric Pairs

| Fc | | Amino Acid |
|---|---|---|
| Dimer | Fc | Substitution Set |
| No. | Monomer | (EU Numbering) |
| 1 | Knob | T366W |
| | Hole | T366S/L368A/Y407V |

[0385] As noted, the heterodimeric Fcs of the present disclosure are provided as a complementary heterodimeric pair of polypeptides of the formulae [1] and [2] wherein the first and second polypeptide are linked by at least one disulfide bond. In some embodiments, the incorporation of a disulfide bond between the polypeptides of formulae [1] and [2] may be achieved by cysteine substitutions at particular points within the Fc1 and Fc2 domains. In one embodiment, the Fc1 domain of the polypeptide of formula [1] is derived from the Fc domain of hIgG1 comprising an amino acid substitution S354C (EU numbering) and the Fc2 domain of the polypeptide of formula [2] is derived from the Fc domain of hIgG1 comprising an amino acid substitution Y349C (EU numbering) to provide a disulfide bond between the S354C of Fc1 and Y349C of Fc2. Alternatively, the Fc1 domain of the polypeptide of formula [1] is derived from the Fc domain of hIgG1 comprising an amino acid substitution Y349C (EU numbering) and the Fc2 domain of the polypeptide of formula [2] is derived from the Fc domain of hIgG1 comprising an amino acid substitution S354C (EU numbering) to provide a disulfide bond between the S354C of Fc1 and Y349C of Fc2.

[0386] Further examples of complementary KiH engineered heterodimeric Fc pairs that may be used in the practice of the present disclosure are provided in the Table below.

TABLE
Knob-into-Hole Fc Dimer Pairs

| Fc Dimer | Monomer | Monomer | UH | UH | Fc Amino Acid Substitutions | Fc |
|---|---|---|---|---|---|---|
| Pair. | Type | SEQ ID | Sequence | SEQ ID | (EU Numbering) | Seq ID |
| 2 | Knob | 19 | wt | 11 | T366W | 17 |
| | Hole | 20 | wt | 11 | T366S/L368A/Y407V | 18 |
| 3 | Knob | 21 | C220S | 12 | T366W | 17 |
| | Hole | 22 | C220S | 12 | T366S/L368A/Y407V | 18 |
| 4 | Knob | 23 | wt | 11 | T366W | 17 |
| | Hole | 24 | wt | 11 | T366S/L368A/Y407V | 18 |
| 5 | Knob | 25 | C220S | 12 | S354C/T366W | 17 |
| | Hole | 26 | C220S | 12 | Y349C/T366S/L368A/Y407V | 18 |

### Additional Fc Modifications

[0387] In addition to the modifications to promote heterodimerization of the Fc1 and Fc2 domains, Fc1 and Fc2 may optionally provide additional amino acid modifications that mitigate effector function, or eliminate the glycosylation site at N297 such as N297Q.

### Modifications to Reduce Effector Functions

[0388] In some embodiments the amino acid sequence of the Fc1 and/or Fc2 monomers modified to promote heterodimerization may be further modified to reduce effector function. In some embodiments, the Fc domain may be modified to substantially reduce binding to Fc receptors (FcyR and FcR) which reduces or abolishes antibody directed cytotoxicity (ADCC) effector function. Modification of Fc domains to reduce effector function are well known in the art. See, e.g., Wang, et al. (2018) IgG Fc engineering to modulate antibody effector functions, Protein Cell 9(1):63-73. For example, mutation of the lysine residue at position 235 (EU numbering) from leucine (L) to glutamic acid (E) is known to reduce effector function by reducing FcgR and C1q binding. Alegre, et al. (1992) J. Immunology 148:3461-3468.

[0389] Additionally, substitution of the two leucine (L) residues at positions 234 and 235 (EU numbering) in the IgG1 hinge region with alanine (A), i.e., L234A and L235A, results in decreased complement dependent cytotoxicity (CDC) and antibody dependent cellular cytotoxicity (ADCC). Hezereh et al., (2001) J. Virol 75(24):12161-68. Furthermore, mutation of the proline at position 329 (EU numbering) to alanine (P329A) or glycine, (P329(3) mitigates effector function and may be combined with the L234A and L235A substitutions. In some embodiments, the Fc domains (Fc1 and Fc2) of the compositions of the present invention may comprises the amino acid substitutions L234A/L235A/P329A (EU numbering) referred to as the “LALAPA” substitutions or L234A/L235A/P329G (EU numbering) referred to as the “LALAPG” substitutions. In some embodiments, the Fc domains (Fc1 and Fc2) of the compositions of the present disclosure may comprises the amino acid substitutions E233P/L234V/L235A/MG237 (referred to in the scientific literature as the PVAdelG mutation).

[0390] In some embodiments, the Fc domains (Fc1 and Fc2) of the compositions of the present disclosure are from hIgG4. In such instances where the Fc domains of the heterodimeric IL12 and IL23 muteins are derived from hIgG4, attenuation of effector function may be achieve by introduction of the S228P and/or the L235E mutations (EU numbering).

[0391] Examples of paired KiH Fc dimeric constructs that may be incorporated into the Fcs of the present disclosure are provided in the Table below:

TABLE
Amino Acid Substitution Sets of Complementary IgG1 KiH UH/Fc Heterodimeric
Pairs Comprising Mutations to Reduce Effector Function

| Fc | | |
|---|---|---|
| Dimer | UH Fc | Amino Acid Substitution Set |
| No. | Monomer | (EU Numbering) |
| 6 | Knob | L234A/L235A/P329A/T366W/ΔK447 |
| | Hole | L234A/L235A/P329A/T366S/L368A/Y407V/ΔK447 |
| 7 | Knob | C220S/L234A/L235A/P329A/T366W/ΔK447 |
| | Hole | C220S/L234A/L235A/P329A/T366S/L368A/Y407V/ΔK447 |
| 8 | Knob | L234A/L235A/P329A/S354C/T366W/ΔK447 |
| | Hole | L234A/L235A/P329A/Y349C/T366S/L368A/Y407V/ΔK447 |
| 9 | Knob | C220S/L234A/L235A/P329A/S354C/T366W/ΔK447 |
| | Hole | C220S/L234A/L235A/P329A/Y349C/T366S/L368A/Y407V/ΔK447 |
| 10 | Knob | L234A/L235A/P329G/T366W/ΔK447 |
| | Hole | L234A/L235A/P329G/T366S/L368A/Y407V/ΔK447 |
| 11 | Knob | C220S/L234A/L235G/P329A/T366W/ΔK447 |
| | Hole | C220S/L234A/L235G/P329A/T366S/L368A/Y407V/ΔK447 |
| 12 | Knob | L234A/L235A/P329G/S354C/T366W/ΔK447 |
| | Hole | L234A/L235A/P329G/Y349C/T366S/L368A/Y407V/ΔK447 |
| 13 | Knob | C220S/L234A/L235A/P329G/S354C/T366W/ΔK447 |
| | Hole | C220S/L234A/L235A/P329G/Y349C/T366S/L368A/Y407V/ΔK447 |
| 14 | Knob | L234A/L235E/G237A/A330S/P331S/T366W/ΔK447 |
| | Hole | L234A/L235E/G237A/A330S/P331S/T366S/L368A/Y407V/ΔK447 |
| 15 | Knob | C220S L234A/L235E/G237A/A330S/P331S/T366W/ΔK447 |
| | Hole | C220S/L234A/L235E/G237A/A330S/P331S/T366S/L368A/Y407V/ΔK447 |
| 16 | Knob | L234A/L235E/G237A/A330S/P331S/S354C/T366W/ΔK447 |
| | Hole | L234A/L235E/G237A/A330S/P331S/Y349C/T366S/L368A/Y407V/ΔK447 |
| 17 | Knob | C220S/L234A/L235E/G237A/A330S/P331S/S354C/T366W/ΔK447 |
| | Hole | C220S/L234A/L235E/G237A/A330S/P331S/Y349C/T366S/L368A/Y407V/ΔK447 |
| 18 | Knob | L234F/L235E/P331S/T366W/ΔK447 |
| | Hole | L234F/L235E/P331S/T366S/L368A/Y407V/ΔK447 |
| 19 | Knob | C220S/L234F/L235E/P331S/T366W/ΔK447 |
| | Hole | C220S/L234F/L235E/P331S//L368A/Y407V/ΔK447 |
| 20 | Knob | L234F/L235E/P331S/S354C/T366W/ΔK447 |
| | Hole | L234F/L235E/P331S/Y349C/T366S/L368A/Y407V/ΔK447 |
| 21 | Knob | C220S/S/L234F/L235E/P331S/354C/T366W/ΔK447 |
| | Hole | C220S/L234F/L235E/P331S/Y349C/T366S/L368A/Y407V/ΔK447 |

### Sequence Modification to Extend Duration of Action:

[0392] In some embodiments the amino acid sequence of the Fc1 and/or Fc2 monomers modified to promote heterodimerization may be further modified to incorporate amino acid substitutions which extend the duration of action of the molecule and prevent clearance. In some embodiments, such modifications to the Fc monomer include the amino acid substitutions M428L and N434S (EU numbering) referred to as the “LS” modification. The LS modification may optionally be combined with amino acid substitutions to reduce effector function and provide for disulfide bonds between Fc1 and Fc2. The table below provides exemplary Fc1 and Fc1 heterodimeric pairs possessing complementary sequence modifications to promote heterodimerization that may be employed in the design of the Fc1 and Fc2 polypeptides of the formulae [1] and [2].

[0393] The following Table provides exemplary Fc heterodimeric pairs which may be used in the preparation of Fc1 and Fc2 polypeptides of the heterodimeric Fcs of the present disclosure:

TABLE
Amino Acid Substitution Sets of Complementary IgG1 KiH UH/Fc Heterodimeric Pairs
Comprising Mutations to Reduce Effector Function and LS Halflife Extensions

| Fc | | |
|---|---|---|
| Dimer | UH/Fc | Amino Acid Substitution Set |
| No. | Monomer | (EU Numbering) |
| 22 | Knob | L234A/L235A/P329A/T366W/M428L/N434S/ΔK447 |
| | Hole | L234A/L235A/P329A/T366S/L368A/Y407V/M428L/N434S/ΔK447 |
| 23 | Knob | C220S/L234A/L235A/P329A/T366W/M428L/N434S/ΔK447 |
| | Hole | C220S/L234A/L235A/P329A/T366S/L368A/Y407V/M428L/N434S/ΔK447 |
| 24 | Knob | L234A/L235A/P329A/S354C/T366W/M428L/N434S/ΔK447 |
| | Hole | L234A/L235A/P329A/Y349C/T366S/L368A/Y407V/M428L/N434S/ΔK447 |
| 25 | Knob | C220S/L234A/L235A/P329A/S354C/T366W/M428L/N434S/ΔK447 |
| | Hole | C220S/L234A/L235A/P329A/Y349C/T366S/L368A/Y407V/M428L/N434S/ΔK447 |
| 26 | Knob | L234A/L235A/P329G/T366W/M428L/N434S/ΔK447 |
| | Hole | L234A/L235A/P329G/T366S/L368A/Y407V/M428L/N434S/ΔK447 |
| 27 | Knob | C220S/L234A/L235G/P329A/T366W/M428L/N434S/ΔK447 |
| | Hole | C220S/L234A/L235G/P329A/T366S/L368A/Y407V/M428L/N434S/ΔK447 |
| 28 | Knob | L234A/L235A/P329G/S354C/T366W/M428L/N434S/ΔK447 |
| | Hole | L234A/L235A/P329G/Y349C/T366S/L368A/Y407V/M428L/N434S/ΔK447 |
| 29 | Knob | C220S/L234A/L235A/P329G/S354C/T366W/M428L/N434S/ΔK447 |
| | Hole | C220S/L234A/L235A/P329G/Y349C/T366S/L368A/Y407V/M428L/N434S/ΔK447 |
| 30 | Knob | L234A/L235E/G237A/A330S/P331S/T366W/M428L/N434S/ΔK447 |
| | Hole | L234A/L235E/G237A/A330S/P331S/T366S/L368A/Y407V/M428L/N434S/ΔK447 |
| 31 | Knob | C220S L234A/L235E/G237A/A330S/P331S/T366W/M428L/N434S/ΔK447 |
| | Hole | C220S/L234A/L235E/G237A/A330S/P331S/T366S/L368A/Y407V/M428L/N434S/ΔK447 |
| 32 | Knob | L234A/L235E/G237A/A330S/P331S/S354C/T366W/M428L/N434S/ΔK447 |
| | Hole | L234A/L235E/G237A/A330S/P331S/Y349C/T366S/L368A/Y407V/M428L/N434S/ΔK447 |
| 33 | Knob | C220S/L234A/L235E/G237A/A330S/P331S/S354C/T366W/M428L/N434S/ΔK447 |
| | Hole | C220S/L234A/L235E/G237A/A330S/P331S/Y349C/T366S/L368A/Y407V/M428L/N434S/ΔK447 |
| 34 | Knob | L234F/L235E/P331S/T366W/M428L/N434S/ΔK447 |
| | Hole | L234F/L235E/P331S/T366S/L368A/Y407V/M428L/N434S/ΔK447 |
| 35 | Knob | C220S/L234F/L235E/P331S/T366W/M428L/N434S/ΔK447 |
| | Hole | C220S/L234F/L235E/P331S//L368A/Y407V/M428L/N434S/ΔK447 |
| 36 | Knob | L234F/L235E/P331S/S354C/T366W/M428L/N434S/ΔK447 |
| | Hole | Y L234F/L235E/P331S/349C/T366S/L368A/Y407V/M428L/N434S/ΔK447 |
| 37 | Knob | C220S/S/L234F/L235E/P331S/354C/T366W/M428L/N434S/ΔK447 |
| | Hole | C220S/L234F/L235E/P331S/Y349C/T366S/L368A/Y407V/M428L/N434S/ΔK447 |

[0394] In some embodiments, the Fc domains (Fc1 and Fc2) of the compositions of the present disclosure are from hIgG4. In such instances where the Fc domains of the heterodimeric IL12 and IL23 muteins are derived from hIgG4, heterodimerization of the Fc1 and Fc2 domains by the introduction of the mutations K370E, K409W and E357N, D399V, F405T (EU numbering) in the complementary Fc sequences that comprise the heterodimeric Fc domain.

### Modifications to Eliminate Glycosylation Sites

[0395] In some embodiments the amino acid sequence of the Fc1 and/or Fc2 monomers modified to promote heterodimerization may be further modified to eliminate N-linked or O-linked glycosylation sites. Aglycosylated variants of Fc domains, particularly of the IgG1 subclass are known to be poor mediators of effector function. Jefferies et al. 1998, Immol. Rev., vol. 163, 50-76). It has been shown that glycosylation at position 297 (EU numbering) contributes to effector function. Edelman, et al (1969) PNAS (USA) 63:78-85. In some embodiments, the Fc domains of the compositions of the present disclosure comprise one or modifications to eliminate N- or O linked glycosylation sites. Examples of modifications at N297 to eliminate glycosylation sites in the Fc domain include the amino acid substitutions N297Q and N297G.

[0396] In some embodiments, when the binding protein described herein is to be administered in the format of an Fc domain fusion, particularly in those situations when the polypeptides conjugated to each Fc polypeptide of the Fc domain dimer are different, the Fc domain may be engineered to possess a “knob-into-hole modification.” The knob-into-hole modification is more fully described in Ridgway, et al. (1996) Protein Engineering 9(7):617-621 and U.S. Pat. No. 5,731,168, issued Mar. 24, 1998. The knob-into-hole modification refers to a modification at the interface between two immunoglobulin heavy chains in the CH3 domain, wherein: i) in a CH3 domain of a first heavy chain, an amino acid residue is replaced with an amino acid residue having a larger side chain (e.g., tyrosine or tryptophan) creating a projection from the surface (“knob”), and ii) in the CH3 domain of a second heavy chain, an amino acid residue is replaced with an amino acid residue having a smaller side chain (e.g., alanine or threonine), thereby generating a cavity (“hole”) at interface in the second CH3 domain within which the protruding side chain of the first CH3 domain (“knob”) is received by the cavity in the second CH3 domain. In one embodiment, the “knob-into-hole modification” comprises the amino acid substitution T366W and optionally the amino acid substitution S354C in one of the antibody heavy chains, and the amino acid substitutions T366S, L368A, Y407V and optionally Y349C in the other one of the antibody heavy chains. Furthermore, the Fc domains may be modified by the introduction of cysteine residues at positions S354 and Y349 which results in a stabilizing disulfide bridge between the two antibody heavy chains in the Fc region (Carter, et al. (2001) Immunol Methods 248, 7-15). The knob-into-hole format is used to facilitate the expression of a first polypeptide (e.g., a first V_{H}H in a binding protein described herein) on a first Fc polypeptide with a “knob” modification and a second polypeptide (e.g., a second V_{H}H in a binding protein described herein) on the second Fc polypeptide with a “hole” modification to facilitate the expression of heterodimeric polypeptide conjugates.

[0397] In some embodiments, the binding proteins described herein can have the formats as illustrated in FIGS. 1A-1D. In one example, a first binding protein comprising an anti-IL2Rβ V_{H}H antibody at the N-terminus and an anti-IL2Rγ V_{H}H antibody at the C-terminus (e.g., N-terminus-anti-IL2Rβ V_{H}H antibody-linker-anti-IL2Rγ V_{H}H antibody-C-terminus) can be fused to a first Fc polypeptide, and a second binding protein comprising an anti-IL2Rγ V_{H}H antibody at the N-terminus and an anti-IL2Rβ V_{H}H antibody at the C-terminus (e.g., N-terminus-anti-IL2Rγ V_{H}H antibody-linker-anti-IL2Rβ V_{H}H antibody-C-terminus) can be fused to a second Fc polypeptide (FIG. 1A), in which the first Fc polypeptide and the second Fc polypeptide form an Fc domain. In this example, one Fc polypeptide can comprise T366W as a knob mutation and the other Fc polypeptide can comprise T366S, L368A, Y407V as hole mutations to promoter Fc heterodimer formation.

[0398] In another example, two identical binding proteins can each be conjugated to an Fc polypeptide. Two identical binding protein-Fc polypeptide conjugates can then dimerize to form a homodimer (FIG. 1B). In some embodiments, both binding proteins can have an anti-IL2Rβ V_{H}H antibody at the N-terminus and an anti-IL2Rγ V_{H}H antibody at the C-terminus (e.g., N-terminus-anti-IL2Rβ V_{H}H antibody-linker-anti-IL2Rγ V_{H}H antibody-C-terminus). In other embodiments, both binding proteins can have an anti-IL2Rγ V_{H}H antibody at the N-terminus and an anti-IL2Rβ V_{H}H antibody at the C-terminus (e.g., N-terminus-anti-IL2Rγ V_{H}H antibody-linker-anti-IL2Rβ V_{H}H antibody-C-terminus).

[0399] In yet another example, a binding protein can be conjugated to one of the two Fc polypeptides in an Fc domain (FIGS. 1C and 1D). In this case, one Fc polypeptide can comprise T366W as a knob mutation and the other Fc polypeptide can comprise T366S, L368A, Y407V as hole mutations to promoter heterodimer formation. The binding protein can have an anti-IL2Rβ V_{H}H antibody at the N-terminus and an anti-IL2Rγ V_{H}H antibody at the C-terminus (e.g., N-terminus-anti-IL2Rβ V_{H}H antibody-linker-anti-IL2Rγ V_{H}H antibody-C-terminus). In other embodiments, the binding protein can have an anti-IL2Rγ V_{H}H antibody at the N-terminus and an anti-IL2Rβ V_{H}H antibody at the C-terminus (e.g., N-terminus-anti-IL2Rγ V_{H}H antibody-linker-anti-IL2Rβ V_{H}H antibody-C-terminus).

[0400] In some embodiments, the binding protein can be conjugated to one or more water-soluble polymers, optionally comprising an intervening linker. Examples of water soluble polymers useful in the practice of the present disclosure include polyethylene glycol (PEG), poly-propylene glycol (PPG), polysaccharides (polyvinylpyrrolidone, copolymers of ethylene glycol and propylene glycol, poly(oxyethylated polyol), polyolefinic alcohol), polysaccharides), poly-alpha-hydroxy acid), polyvinyl alcohol (PVA), polyphosphazene, polyoxazolines (POZ), poly(N-acryloylmorpholine), or a combination thereof.

[0401] In some embodiments, binding protein can be conjugated to one or more polyethylene glycol molecules or “PEGylated.” Although the method or site of PEG attachment to the binding protein may vary, in certain embodiments the PEGylation does not alter, or only minimally alters, the activity of the binding protein. A variety of technologies are available for site specific incorporation of PEG moieties as reviewed in Dozier, J. K. and Distefano, M. D. (2015) “Site Specific Pegylation of Therapeutic Proteins” International Journal of Molecular Science 16(10):25832-25864.

[0402] In some embodiments, selective PEGylation of the binding protein, for example, by the incorporation of non-natural amino acids having side chains to facilitate selective PEG conjugation, may be employed. Specific PEGylation sites can be chosen such that PEGylation of the binding protein does not affect its binding to the target receptors.

[0403] In certain embodiments, the increase in half-life is greater than any decrease in biological activity. PEGS suitable for conjugation to a polypeptide sequence are generally soluble in water at room temperature, and have the general formula R(O—CH₂—CH₂)ₙO—R, where R is hydrogen or a protective group such as an alkyl or an alkanol group, and where n is an integer from 1 to 1000. When R is a protective group, it generally has from 1 to 8 carbons. The PEG conjugated to the polypeptide sequence can be linear or branched. Branched PEG derivatives, “star-PEGs” and multi-armed PEGS are contemplated by the present disclosure.

[0404] A molecular weight of the PEG used in the present disclosure is not restricted to any particular range. The PEG component of the binding protein can have a molecular mass greater than about 5 kDa, greater than about 10 kDa, greater than about 15 kDa, greater than about 20 kDa, greater than about 30 kDa, greater than about 40 kDa, or greater than about 50 kDa. In some embodiments, the molecular mass is from about 5 kDa to about 10 kDa, from about 5 kDa to about 15 kDa, from about 5 kDa to about 20 kDa, from about 10 kDa to about 15 kDa, from about 10 kDa to about 20 kDa, from about 10 kDa to about 25 kDa, or from about 10 kDa to about 30 kDa. Linear or branched PEG molecules having molecular weights from about 2,000 to about 80,000 daltons, alternatively about 2,000 to about 70,000 daltons, alternatively about 5,000 to about 50,000 daltons, alternatively about 10,000 to about 50,000 daltons, alternatively about 20,000 to about 50,000 daltons, alternatively about 30,000 to about 50,000 daltons, alternatively about 20,000 to about 40,000 daltons, or alternatively about 30,000 to about 40,000 daltons. In one embodiment of the disclosure, the PEG is a 40 kD branched PEG comprising two 20 kD arms.

[0405] The present disclosure also contemplates compositions of conjugates wherein the PEGS have different n values, and thus the various different PEGS are present in specific ratios. For example, some compositions comprise a mixture of conjugates where n=1, 2, 3 and 4. In some compositions, the percentage of conjugates where n=1 is 18-25%, the percentage of conjugates where n=2 is 50-66%, the percentage of conjugates where n=3 is 12-16%, and the percentage of conjugates where n=4 is up to 5%. Such compositions can be produced by reaction conditions and purification methods known in the art. Chromatography may be used to resolve conjugate fractions, and a fraction is then identified which contains the conjugate having, for example, the desired number of PEGS attached, purified free from unmodified protein sequences and from conjugates having other numbers of PEGs attached.

[0406] PEGS suitable for conjugation to a polypeptide sequence are generally soluble in water at room temperature, and have the general formula R(O—CH₂—CH₂)ₙO—R, where R is hydrogen or a protective group such as an alkyl or an alkanol group, and where n is an integer from 1 to 1000. When R is a protective group, it generally has from 1 to 8 carbons.

[0407] Two widely used first generation activated monomethoxy PEGS (mPEGs) are succinimidyl carbonate PEG (SC-PEG; see, e.g., Zalipsky, et al. (1992) Biotehnol. App. Biochem 15:100-114) and benzotriazole carbonate PEG (BTC-PEG; see, e.g., Dolence, et al. U.S. Pat. No. 5,650,234), which react preferentially with lysine residues to form a carbamate linkage but are also known to react with histidine and tyrosine residues. Use of a PEG-aldehyde linker targets a single site on the N-terminus of a polypeptide through reductive amination.

[0408] Pegylation most frequently occurs at the α-amino group at the N-terminus of the polypeptide, the epsilon amino group on the side chain of lysine residues, and the imidazole group on the side chain of histidine residues. Since most recombinant polypeptides possess a single alpha and a number of epsilon amino and imidazole groups, numerous positional isomers can be generated depending on the linker chemistry. General PEGylation strategies known in the art can be applied herein.

[0409] The PEG can be bound to a binding protein of the present disclosure via a terminal reactive group (a “spacer”) which mediates a bond between the free amino or carboxyl groups of one or more of the polypeptide sequences and polyethylene glycol. The PEG having the spacer which can be bound to the free amino group includes N-hydroxysuccinylimide polyethylene glycol, which can be prepared by activating succinic acid ester of polyethylene glycol with N-hydroxysuccinylimide.

[0410] In some embodiments, the PEGylation of the binding proteins is facilitated by the incorporation of non-natural amino acids bearing unique side chains to facilitate site specific PEGylation. The incorporation of non-natural amino acids into polypeptides to provide functional moieties to achieve site specific PEGylation of such polypeptides is known in the art. See e.g., Ptacin et al., PCT International Application No. PCT/US2018/045257 filed Aug. 3, 2018 and published Feb. 7, 2019 as International Publication Number WO 2019/028419A1.

[0411] The PEG conjugated to the polypeptide sequence can be linear or branched. Branched PEG derivatives, “star-PEGs” and multi-armed PEGS are contemplated by the present disclosure. Specific embodiments PEGS useful in the practice of the present disclosure include a 10 kDa linear PEG-aldehyde (e.g., Sunbright® ME-100AL, NOF America Corporation, One North Broadway, White Plains, NY 10601 USA), 10 kDa linear PEG-NHS ester (e.g., Sunbright® ME-100CS, Sunbright® ME-100AS, Sunbright® ME-100GS, Sunbright® ME-100HS, NOF), a 20 kDa linear PEG-aldehyde (e.g., Sunbright® ME-200AL, NOF), a 20 kDa linear PEG-NHS ester (e.g., Sunbright® ME-20005, Sunbright® ME-200AS, Sunbright® ME-200G5, Sunbright® ME-200H5, NOF), a 20 kDa 2-arm branched PEG-aldehyde the 20 kDA PEG-aldehyde comprising two 10kDA linear PEG molecules (e.g., Sunbright® GL2-200AL3, NOF), a 20 kDa 2-arm branched PEG-NHS ester the 20 kDA PEG-NHS ester comprising two 10kDA linear PEG molecules (e.g., Sunbright® GL2-200TS, Sunbright® GL200GS2, NOF), a 40 kDa 2-arm branched PEG-aldehyde the 40 kDA PEG-aldehyde comprising two 20kDA linear PEG molecules (e.g., Sunbright® GL2-400AL3), a 40 kDa 2-arm branched PEG-NHS ester the 40 kDA PEG-NHS ester comprising two 20kDA linear PEG molecules (e.g., Sunbright® GL2-400AL3, Sunbright® GL2-400GS2, NOF), a linear 30 kDa PEG-aldehyde (e.g., Sunbright® ME-300AL) and a linear 30 kDa PEG-NHS ester.

[0412] In some embodiments, a linker can used to join the binding protein and the PEG molecule. Suitable linkers include “flexible linkers” which are generally of sufficient length to permit some movement between the modified polypeptide sequences and the linked components and molecules. The linker molecules are generally about 6-50 atoms long. The linker molecules may also be, for example, aryl acetylene, ethylene glycol oligomers containing 2-10 monomer units, diamines, diacids, amino acids, or combinations thereof. Suitable linkers can be readily selected and can be of any suitable length, such as 1 amino acid (e.g., Gly), 2, 3, 4, 5, 6, 7, 8, 9, 10, 10-20, 20-30, 30-50 or more than 50 amino acids.

[0413] Examples of flexible linkers include glycine polymers (G)n, glycine-alanine polymers, alanine-serine polymers, glycine-serine polymers (for example, (GmSo)n (SEQ ID NO: 798), (GSGGS)n (SEQ ID NO: 799), (GmSoGm)n (SEQ ID NO: 800), (GmSoGmSoGm)n (SEQ ID NO: 801), (GSGGSm)n (SEQ ID NO: 802), (GSGSmG)n (SEQ ID NO: 803) and (GGGSm)n (SEQ ID NO: 804), and combinations thereof, where m, n, and o are each independently selected from an integer of at least 1 to 20, e.g., 1-18, 216, 3-14, 4-12, 5-10, 1, 2, 3, 4, 5, 6, 7, 8, 9, or 10), and other flexible linkers. Glycine and glycine-serine polymers are relatively unstructured, and therefore may serve as a neutral tether between components. Examples of flexible linkers are described in Section V.

[0414] Additional examples of flexible linkers include glycine polymers (G)n or glycine-serine polymers (e.g., (GS)n (SEQ ID NO: 805), (GSGGS)n (SEQ ID NO: 806), (GGGS)n (SEQ ID NO: 807) and (GGGGS)n (SEQ ID NO: 808), where n=1 to 50, for example, 1, 2, 3, 4, 5, 6, 7, 8, 9, 10, 10-20, 20-30, 30-50). A multimer (e.g., 1, 2, 3, 4, 5, 6, 7, 8, 9, 10, 10-20, 20-30, or 30-50) of these linker sequences may be linked together to provide flexible linkers that may be used to conjugate two molecules. Alternative to a polypeptide linker, the linker can be a chemical linker, e.g., a PEG-aldehyde linker. In some embodiments, the binding protein is acetylated at the N-terminus by enzymatic reaction with N-terminal acetyltransferase and, for example, acetyl CoA. Alternatively, or in addition to N-terminal acetylation, the binding protein can be acetylated at one or more lysine residues, e.g., by enzymatic reaction with a lysine acetyltransferase. See, for example Choudhary et al. (2009) Science 325 (5942):834-840.

[0415] In other embodiments, the binding protein can be modified to include an additional polypeptide sequence that functions as an antigenic tag, such as a FLAG sequence. FLAG sequences are recognized by biotinylated, highly specific, anti-FLAG antibodies, as described herein (see e.g., Blanar et al. (1992) Science 256:1014 and LeClair, et al. (1992) PNAS-USA 89:8145). In some embodiments, the binding protein further comprises a C-terminal c-myc epitope tag.

[0416] In some embodiments, the binding protein is expressed as a fusion protein with an albumin molecule (e.g., human serum albumin) which is known in the art to facilitate extended exposure in vivo.

[0417] In some embodiment, the binding proteins (including fusion proteins of the binding proteins) of the present disclosure are expressed as a fusion protein with one or more transition metal chelating polypeptide sequences. The incorporation of such a transition metal chelating domain facilitates purification immobilized metal affinity chromatography (IMAC) as described in Smith, et al. U.S. Pat. No. 4,569,794 issued Feb. 11, 1986. Examples of transition metal chelating polypeptides useful in the practice of the present disclosure are described in Smith, et al. supra and Dobeli, et al. U.S. Pat. No. 5,320,663 issued May 10, 1995, the entire teachings of which are hereby incorporated by reference. Particular transition metal chelating polypeptides useful in the practice of the present disclosure are peptides comprising 3-6 contiguous histidine residues (SEQ ID NO: 809) such as a six-histidine peptide (His)₆ (SEQ ID NO: 127) and are frequently referred to in the art as “His-tags.”

[0418] The foregoing fusion proteins may be readily produced by recombinant DNA methodology by techniques known in the art by constructing a recombinant vector comprising a nucleic acid sequence comprising a nucleic acid sequence encoding the binding protein in frame with a nucleic acid sequence encoding the fusion partner either at the N-terminus or C-terminus of the binding protein, the sequence optionally further comprising a nucleic acid sequence in frame encoding a linker or spacer polypeptide.

### VII. Pharmaceutical Composition

[0419] The binding proteins of the present disclosure may be administered to a subject in a pharmaceutically acceptable dosage form. The preferred formulation depends on the intended mode of administration and therapeutic application. Pharmaceutical dosage forms of the binding proteins described herein comprise physiologically acceptable carriers that are inherently non-toxic and non-therapeutic. Examples of such carriers include ion exchangers, alumina, aluminum stearate, lecithin, serum proteins, such as human serum albumin, buffer substances such as phosphates, glycine, sorbic acid, potassium sorbate, partial glyceride mixtures of saturated vegetable fatty acids, water, salts, or electrolytes such as protamine sulfate, disodium hydrogen phosphate, potassium hydrogen phosphate, sodium chloride, zinc salts, colloidal silica, magnesium trisilicate, polyvinyl pyrrolidone, cellulose-based substances, and PEG. Carriers for topical or gel-based forms of polypeptides include polysaccharides such as sodium carboxymethylcellulose or methylcellulose, polyvinylpyrrolidone, polyacrylates, polyoxyethylene-polyoxypropylene-block polymers, PEG, polymeric amino acids, amino acid copolymers, and lipid aggregates (such as oil droplets or liposomes).

[0420] The pharmaceutical compositions may also comprise pharmaceutically-acceptable, non-toxic carriers, excipients, stabilizers, or diluents, which are defined as vehicles commonly used to formulate pharmaceutical compositions for animal or human administration. The diluent is selected so as not to affect the biological activity of the combination. Acceptable carriers, excipients, or stabilizers are non-toxic to recipients at the dosages and concentrations employed, and include buffers such as phosphate, citrate, and other organic acids; antioxidants including ascorbic acid and methionine; preservatives (such as octadecyidimethylbenzyl ammonium chloride; hexamethonium chloride; benzalkonium chloride, benzethonium chloride; phenol, butyl or benzyl alcohol; alkyl parabens such as methyl or propyl paraben; catechol; resorcinol; cyclohexanol; 3-pentanol; and m-cresol); low molecular weight (less than about 10 residues) polypeptides; proteins, such as serum albumin, gelatin, or immunoglobulins; hydrophilic polymers such as polyvinylpyrrolidone; amino acids such as glycine, glutamine, asparagine, histidine, arginine, or lysine; monosaccharides, disaccharides, and other carbohydrates including glucose, mannose, or dextrins; chelating agents such as EDTA; sugars such as sucrose, mannitol, trehalose or sorbitol; salt-forming counter-ions such as sodium; metal complexes (e.g.. Zn-protein complexes); and/or non-ionic surfactants such as TWEEN™, PLURONICS™ or polyethylene glycol (PEG).

[0421] Formulations to be used for in vivo administration are typically sterile. Sterilization of the compositions of the present disclosure may readily accomplished by filtration through sterile filtration membranes.

[0422] Typically, compositions are prepared as injectables, either as liquid solutions or suspensions; solid forms suitable for solution in, or suspension in, liquid vehicles prior to injection can also be prepared. The preparation also can be emulsified or encapsulated in liposomes or micro particles such as polylactide, polyglycolide, or copolymer for enhanced adjuvant effect, as discussed above (Langer, Science 249: 1527, 1990 and Hanes, Advanced Drug Delivery Reviews 28: 97-119, 1997). The agents of this disclosure can be administered in the form of a depot injection or implant preparation which can be formulated in such a manner as to permit a sustained or pulsatile release of the active ingredient. The pharmaceutical compositions are generally formulated as sterile, substantially isotonic and in full compliance with all Good Manufacturing Practice (GMP) regulations of the U.S. Food and Drug Administration.

[0423] Administration of a binding protein described herein may be achieved through any of a variety of art recognized methods including but not limited to the topical, intravascular injection (including intravenous or intraarterial infusion), intradermal injection, subcutaneous injection, intramuscular injection, intraperitoneal injection, intracranial injection, intratumoral injection, intranodal injection, transdermal, transmucosal, iontophoretic delivery, intralymphatic injection (Senti and Kundig (2009) Current Opinions in Allergy and Clinical Immunology 9(6):537-543), intragastric infusion, intraprostatic injection, intravesical infusion (e.g., bladder), respiratory inhalers including nebulizers, intraocular injection, intraabdominal injection, intralesional injection, intraovarian injection, intracerebral infusion or injection, intracerebroventricular injection (ICVI), and the like. In some embodiments, administration includes the administration of the binding protein itself (e.g., parenteral), as well as the administration of a recombinant vector (e.g., viral or non-viral vector) to cause the in situ expression of the binding protein in the subject. Alternatively, a cell, such as a cell isolated from the subject, could also be recombinantly modified to express the binding protein of the present disclosure.

[0424] The dosage of the pharmaceutical compositions depends on factors including the route of administration, the disease to be treated, and physical characteristics, e.g., age, weight, general health, of the subject. Typically, the amount of a binding protein contained within a single dose may be an amount that effectively prevents, delays, or treats the disease without inducing significant toxicity. A pharmaceutical composition of the disclosure may include a dosage of a binding protein described herein ranging from 0.01 to 500 mg/kg (e.g., from 0.01 to 450 mg, from 0.01 to 400 mg, from 0.01 to 350 mg, from 0.01 to 300 mg, from 0.01 to 250 mg, from 0.01 to 200 mg, from 0.01 to 150 mg, from 0.01 to 100 mg, from 0.01 to 50 mg, from 0.01 to 10 mg, from 0.01 to 1 mg, from 0.1 to 500 mg/kg, from 1 to 500 mg/kg, from 5 to 500 mg/kg, from 10 to 500 mg/kg, from 50 to 500 mg/kg, from 100 to 500 mg/kg, from 150 to 500 mg/kg, from 200 to 500 mg/kg, from 250 to 500 mg/kg, from 300 to 500 mg/kg, from 350 to 500 mg/kg, from 400 to 500 mg/kg, or from 450 to 500 mg/kg) and, in a more specific embodiment, about 1 to about 100 mg/kg (e.g., about 1 to about 90 mg/kg, about 1 to about 80 mg/kg, about 1 to about 70 mg/kg, about 1 to about 60 mg/kg, about 1 to about 50 mg/kg, about 1 to about 40 mg/kg, about 1 to about 30 mg/kg, about 1 to about 20 mg/kg, about 1 to about 10 mg/kg, about 10 to about 100 mg/kg, about 20 to about 100 mg/kg, about 30 to about 100 mg/kg, about 40 to about 100 mg/kg, about 50 to about 100 mg/kg, about 60 to about 100 mg/kg, about 70 to about 100 mg/kg, about 80 to about 100 mg/kg, or about 90 to about 100 mg/kg). In some embodiments, a pharmaceutical composition of the disclosure may include a dosage of a binding protein described herein ranging from 0.01 to 20 mg/kg (e.g., from 0.01 to 15 mg/kg, from 0.01 to 10 mg/kg, from 0.01 to 8 mg/kg, from 0.01 to 6 mg/kg, from 0.01 to 4 mg/kg, from 0.01 to 2 mg/kg, from 0.01 to 1 mg/kg, from 0.01 to 0.1 mg/kg, from 0.01 to 0.05 mg/kg, from 0.05 to 20 mg/kg, from 0.1 to 20 mg/kg, from 1 to 20 mg/kg, from 2 to 20 mg/kg, from 4 to 20 mg/kg, from 6 to 20 mg/kg, from 8 to 20 mg/kg, from 10 to 20 mg/kg, from 15 to 20 mg/kg). The dosage may be adapted by the physician in accordance with conventional factors such as the extent of the disease and different parameters of the subject.

[0425] A pharmaceutical composition containing a binding protein described herein can be administered to a subject in need thereof, for example, one or more times (e.g., 1-10 times or more) daily, weekly, monthly, biannually, annually, or as medically necessary. Dosages may be provided in either a single or multiple dosage regimens. The timing between administrations may decrease as the medical condition improves or increase as the health of the patient declines. A course of therapy may be a single dose or in multiple doses over a period of time. In some embodiments, a single dose is used. In some embodiments, two or more split doses administered over a period of 1, 2, 3, 4, 5, 6, 7, 8, 9, 10, 11, 12, 13, 14, 21, 28, 30, 60, 90, 120 or 180 days are used. Each dose administered in such split dosing protocols may be the same in each administration or may be different. Multi-day dosing protocols over time periods may be provided by the skilled artisan (e.g., physician) monitoring the administration, taking into account the response of the subject to the treatment including adverse effects of the treatment and their modulation as discussed above. In some embodiments, the serum trough concentration of the binding molecule is maintained above a threshold level corresponding to about 0.1 pg/ml, alternatively 0.1 ng/ml, alternatively about 0.5 ng/ml alternatively 1 ng/ml, alternatively 2 ng/ml, for at least 80%, alternatively at least 85%, alternatively at least 90%, alternatively at least 95% of a period of time of at least 24 hours, alternatively 48 hours, alternatively 72 hours, alternatively one week, alternatively 1 month. See, e.g. Mumm, et al. United States Patent Publication US2016/0193300A1 published Jul. 7, 2016.

### VIII. Methods of Use

### Neoplastic Diseases

[0426] The present disclosure provides methods of use of binding proteins that bind to IL2Rβ and IL2Rγ in the treatment of subjects suffering from a neoplastic disease disorder or condition by the administration of a therapeutically effective amount of a binding protein (or nucleic acid encoding a binding protein including recombinant vectors encoding the binding protein) as described herein.

[0427] The compositions and methods of the present disclosure are useful in the treatment of subject suffering from a neoplastic disease characterized by the presence neoplasms, including benign and malignant neoplasms, and neoplastic disease.

[0428] Examples benign neoplasms amenable to treatment using the compositions and methods of the present disclosure include but are not limited to adenomas, fibromas, hemangiomas, and lipomas. Examples of pre-malignant neoplasms amenable to treatment using the compositions and methods of the present disclosure include but are not limited to hyperplasia, atypia, metaplasia, and dysplasia. Examples of malignant neoplasms amenable to treatment using the compositions and methods of the present disclosure include but are not limited to carcinomas (cancers arising from epithelial tissues such as the skin or tissues that line internal organs), leukemias, lymphomas, and sarcomas typically derived from bone fat, muscle, blood vessels or connective tissues). Also included in the term neoplasms are viral induced neoplasms such as warts and EBV induced disease (i.e., infectious mononucleosis), scar formation, hyperproliferative vascular disease including intimal smooth muscle cell hyperplasia, restenosis, and vascular occlusion and the like.

[0429] The term “neoplastic disease” includes cancers characterized by solid tumors and non-solid tumors including, but not limited to, breast cancers, sarcomas (including but not limited to osteosarcomas and angiosarcomas and fibrosarcomas), leukemias, lymphomas, genitourinary cancers (including but not limited to ovarian, urethral, bladder, and prostate cancers), gastrointestinal cancers (including but not limited to colon esophageal and stomach cancers), lung cancers, myelomas, pancreatic cancers, liver cancers, kidney cancers, endocrine cancers, skin cancers, and brain or central and peripheral nervous (CNS) system tumors, malignant or benign, including gliomas and neuroblastomas, astrocytomas, myelodysplastic disorders, cervical carcinoma-in-situ, intestinal polyposes, oral leukoplakias, histiocytoses, hyperprofroliferative scars including keloid scars, hemangiomas, hyperproliferative arterial stenosis, psoriasis, inflammatory arthritis, hyperkeratoses, and papulosquamous eruptions including arthritis.

[0430] The term “neoplastic disease” includes carcinomas. The term “carcinoma” refers to malignancies of epithelial or endocrine tissues including respiratory system carcinomas, gastrointestinal system carcinomas, genitourinary system carcinomas, testicular carcinomas, breast carcinomas, prostatic carcinomas, endocrine system carcinomas, and melanomas. The term neoplastic disease includes adenocarcinomas. An “adenocarcinoma” refers to a carcinoma derived from glandular tissue or in which the tumor cells form recognizable glandular structures.

[0431] As used herein, the term “hematopoietic neoplastic disorders” refers to neoplastic diseases involving hyperplastic/neoplastic cells of hematopoietic origin, e.g., arising from myeloid, lymphoid or erythroid lineages, or precursor cells thereof.

[0432] Myeloid neoplasms include, but are not limited to, myeloproliferative neoplasms, myeloid and lymphoid disorders with eosinophilia, myeloproliferative/myelodysplastic neoplasms, myelodysplastic syndromes, acute myeloid leukemia and related precursor neoplasms, and acute leukemia of ambiguous lineage. Exemplary myeloid disorders amenable to treatment in accordance with the present disclosure include, but are not limited to, acute promyeloid leukemia (APML), acute myelogenous leukemia (AML), and chronic myelogenous leukemia (CML).

[0433] Lymphoid neoplasms include, but are not limited to, precursor lymphoid neoplasms, mature B-cell neoplasms, mature T-cell neoplasms, Hodgkin's Lymphoma, and immunodeficiency-associated lymphoproliferative disorders. Exemplary lymphic disorders amenable to treatment in accordance with the present disclosure include, but are not limited to, acute lymphoblastic leukemia (ALL) which includes B-lineage ALL and T-lineage ALL, chronic lymphocytic leukemia (CLL), prolymphocytic leukemia (PLL), hairy cell leukemia (HLL), and Waldenstrom's macroglobulinemia (WM).

[0434] In some instances, the hematopoietic neoplastic disorder arises from poorly differentiated acute leukemias (e.g., erythroblastic leukemia and acute megakaryoblastic leukemia). As used herein, the term “hematopoietic neoplastic disorders” refers malignant lymphomas including, but are not limited to, non-Hodgkins lymphoma and variants thereof, peripheral T cell lymphomas, adult T-cell leukemia/lymphoma (ATL), cutaneous T cell lymphoma (CTCL), large granular lymphocytic leukemia (LGF), Hodgkin's disease, and Reed-Stemberg disease.

[0435] The determination of whether a subject is “suffering from a neoplastic disease” refers to a determination made by a physician with respect to a subject based on the available information accepted in the field for the identification of a disease, disorder or condition including but not limited to X-ray, CT-scans, conventional laboratory diagnostic tests (e.g. blood count, etc.), genomic data, protein expression data, immunohistochemistry, that the subject requires or will benefit from treatment.

### Assessing Anti-Neoplastic Efficacy

[0436] The determination of efficacy of the methods of the present disclosure in the treatment of cancer is generally associated with the achievement of one or more art recognized parameters such as reduction in lesions particularly reduction of metastatic lesion, reduction in metastatsis, reduction in tumor volume, improvement in ECOG score, and the like. Determining response to treatment can be assessed through the measurement of biomarker that can provide reproducible information useful in any aspect of binding protein therapy, including the existence and extent of a subject's response to such therapy and the existence and extent of untoward effects caused by such therapy. By way of example, but not limitation, biomarkers include enhancement of IFNγ, and upregulation of granzyme A, granzyme B, and perforin; increase in CD8⁺ T-cell number and function; enhancement of IFNγ, an increase in ICOS expression on CD8⁺ T-cells, enhancement of IL10 expressing T_{Reg} cells. The response to treatment may be characterized by improvements in conventional measures of clinical efficacy may be employed such as Complete Response (CR), Partial Response (PR), Stable Disease (SD) and with respect to target lesions, Complete Response (CR),” Incomplete Response/Stable Disease (SD) as defined by RECIST as well as immune-related Complete Response (irCR), immune-related Partial Response (irPR), and immune-related Stable Disease (irSD) as defined Immune-Related Response Criteria (irRC) are considered by those of skill in the art as evidencing efficacy in the treatment of neoplastic disease in mammalian (e.g., human) subjects.

[0437] Further embodiments comprise a method or model for determining the optimum amount of an agent(s) in a combination. An optimum amount can be, for example, an amount that achieves an optimal effect in a subject or subject population, or an amount that achieves a therapeutic effect while minimizing or eliminating the adverse effects associated with one or more of the agents. In some embodiments, the methods involving the combination of a binding protein described herein and a supplementary agent which is known to be, or has been determined to be, effective in treating or preventing a disease, disorder or condition described herein (e.g., a cancerous condition) in a subject (e.g., a human) or a subject population, and an amount of one agent is titrated while the amount of the other agent(s) is held constant. By manipulating the amounts of the agent(s) in this manner, a clinician is able to determine the ratio of agents most effective for, for example, treating a particular disease, disorder or condition, or eliminating the adverse effects or reducing the adverse effects such that are acceptable under the circumstances.

Combination Of Binding Proteins with Supplementary Therapeutic Agents

[0438] The present disclosure provides the for the use of the binding proteins of the present disclosure in combination with one or more additional active agents (“supplementary agents”). Such further combinations are referred to interchangeably as “supplementary combinations” or “supplementary combination therapy” and those therapeutic agents that are used in combination with binding proteins of the present disclosure are referred to as “supplementary agents.” As used herein, the term “supplementary agents” includes agents that can be administered or introduced separately, for example, formulated separately for separate administration (e.g., as may be provided in a kit) and/or therapies that can be administered or introduced in combination with the binding proteins.

[0439] As used herein, the term “in combination with” when used in reference to the administration of multiple agents to a subject refers to the administration of a first agent at least one additional (i.e. second, third, fourth, fifth, etc.) agent to a subject. For purposes of the present invention, one agent (e.g., a binding protein described herein) is considered to be administered in combination with a second agent (e.g. a modulator of an immune checkpoint pathway) if the biological effect resulting from the administration of the first agent persists in the subject at the time of administration of the second agent such that the therapeutic effects of the first agent and second agent overlap. For example, the PD1 immune checkpoint inhibitors (e.g. nivolumab or pembrolizumab) are typically administered by IV infusion every two weeks or every three weeks while the binding proteins of the present disclosure are typically administered more frequently, e.g. daily, BID, or weekly. However, the administration of the first agent (e.g. pembrolizumab) provides a therapeutic effect over an extended time and the administration of the second agent (e.g., a binding protein described herein) provides its therapeutic effect while the therapeutic effect of the first agent remains ongoing such that the second agent is considered to be administered in combination with the first agent, even though the first agent may have been administered at a point in time significantly distant (e.g. days or weeks) from the time of administration of the second agent. In one embodiment, one agent is considered to be administered in combination with a second agent if the first and second agents are administered simultaneously (within 30 minutes of each other), contemporaneously or sequentially. In some embodiments, a first agent is deemed to be administered “contemporaneously” with a second agent if first and second agents are administered within about 24 hours of each another, preferably within about 12 hours of each other, preferably within about 6 hours of each other, preferably within about 2 hours of each other, or preferably within about 30 minutes of each other. The term “in combination with” shall also understood to apply to the situation where a first agent and a second agent are co-formulated in single pharmaceutically acceptable formulation and the co-formulation is administered to a subject.

[0440] In certain embodiments, the binding protein and the supplementary agent(s) are administered or applied sequentially, e.g., where one agent is administered prior to one or more other agents. In other embodiments, the binding protein and the supplementary agent(s) are administered simultaneously, e.g., where two or more agents are administered at or about the same time; the two or more agents may be present in two or more separate formulations or combined into a single formulation (i.e., a co-formulation). Regardless of whether the agents are administered sequentially or simultaneously, they are considered to be administered in combination for purposes of the present disclosure.

### Chemotherapeutic Agents

[0441] In some embodiments, the supplementary agent is a chemotherapeutic agent. In some embodiments the supplementary agent is a “cocktail” of multiple chemotherapeutic agents. In some embodiments the chemotherapeutic agent or cocktail is administered in combination with one or more physical methods (e.g., radiation therapy). The term “chemotherapeutic agents” includes but is not limited to alkylating agents such as thiotepa and cyclosphosphamide, alkyl sulfonates such as busulfan, improsulfan and piposulfan, aziridines such as benzodopa, carboquone, meturedopa, and uredopa, ethylenimines and methylamelamines including altretamine, triethylenemelamine, trietylenephosphoramide, triethylenethiophosphaoramide and trimethylolomelamime, nitrogen mustards such as chiorambucil, chlomaphazine, cholophosphamide, estramustine, ifosfamide, mechlorethamine, mechlorethamine oxide hydrochloride, melphalan, novembichin, phenesterine, prednimustine, trofosfamide, uracil mustard, nitrosureas such as carmustine, chlorozotocin, fotemustine, lomustine, nimustine, ranimustine, antibiotics such as aclacinomysins, actinomycin, authramycin, azaserine, bleomycins such as bleomycin A₂, cactinomycin, calicheamicin, carabicin, caminomycin, carzinophilin, chromomycins, dactinomycin, daunorubicin and derivaties such as demethoxy-daunomycin, 11-deoxydaunorubicin, 13-deoxydaunorubicin, detorubicin, 6-diazo-5-oxo-L-norleucine, doxorubicin, epirubicin, esorubicin, idarubicin, marcellomycin, mitomycins such as mitomycin C, N-methyl mitomycin C, mycophenolic acid, nogalamycin, olivomycins, peplomycin, potfiromycin, puromycin, quelamycin, rodorubicin, streptonigrin, streptozocin, tubercidin, ubenimex, zinostatin, zorubicin, anti-metabolites such as methotrexate and 5-fluorouracil (5-FU), folic acid analogues such as denopterin, methotrexate, pteropterin, trimetrexate, dideazatetrahydrofolic acid, and folinic acid, purine analogs such as fludarabine, 6-mercaptopurine, thiamiprine, thioguanine, pyrimidine analogs such as ancitabine, azacitidine, 6-azauridine, carmofur, cytarabine, dideoxyuridine, doxifluridine, enocitabine, floxuridine, 5-FU, androgens such as calusterone, dromostanolone propionate, epitiostanol, mepitiostane, testolactone, anti-adrenals such as aminoglutethimide, mitotane, trilostane, folic acid replenisher such as frolinic acid, aceglatone, aldophosphamide glycoside, aminolevulinic acid, amsacrine, bestrabucil, bisantrene, edatraxate, defofamine, demecolcine, diaziquone, elformithine, elliptinium acetate, etoglucid, gallium nitrate, hydroxyurea, lentinan, lonidamine, mitoguazone, mitoxantrone, mopidamol, nitracrine, pentostatin, phenamet, pirarubicin, podophyllinic acid, 2-ethylhydrazide, procarbazine, razoxane, sizofiran, spirogermanium, tenuazonic acid, triaziquone, 2,2′,2″-trichlorotriethylamine, urethan, vindesine, dacarbazine, mannomustine, mitobronitol, mitolactol, pipobroman, gacytosine, arabinoside (Ara-C), cyclophosphamide, thiotepa, taxoids, e.g., paclitaxel, nab-paclitaxel and doxetaxel, chlorambucil, gemcitabine, 6-thioguanine, mercaptopurine, methotrexate, platinum and platinum coordination complexes such as cisplatin, oxaplatin and carboplatin, vinblastine, etoposide (VP-16), ifosfamide, mitomycin C, mitoxantrone, vincristine, vinorelbine, navelbine, novantrone, teniposide, daunomycin, aminopterin, xeloda, ibandronate, CPT11, topoisomerase inhibitors, difluoromethylomithine (DMFO), retinoic acid, esperamicins, capecitabine, taxanes such as paclitaxel, docetaxel, cabazitaxel, carminomycin, adriamycins such as 4′-epiadriamycin, 4-adriamycin-14-benzoate, adriamycin-14-octanoate, adriamycin-14-naphthaleneacetate, cholchicine and pharmaceutically acceptable salts, acids or derivatives of any of the above.

[0442] The term “chemotherapeutic agents” also includes anti-hormonal agents that act to regulate or inhibit hormone action on tumors such as anti-estrogens, including for example tamoxifen, raloxifene, aromatase inhibiting 4(5)-imidazoles, 4-hydroxytamoxifen, trioxifene, keoxifene, onapristone, and toremifene; and antiandrogens such as flutamide, nilutamide, bicalutamide, leuprolide, and goserelin; and pharmaceutically acceptable salts, acids or derivatives of any of the above.

[0443] In some embodiments, a supplementary agent is one or more chemical or biological agents identified in the art as useful in the treatment of neoplastic disease, including, but not limited to, a cytokines or cytokine antagonists such as IL12, INFα, or anti-epidermal growth factor receptor, irinotecan; tetrahydrofolate antimetabolites such as pemetrexed; antibodies against tumor antigens, a complex of a monoclonal antibody and toxin, a T-cell adjuvant, bone marrow transplant, or antigen presenting cells (e.g., dendritic cell therapy), anti-tumor vaccines, replication competent viruses, signal transduction inhibitors (e.g.. Gleevec® or Herceptin®) or an immunomodulator to achieve additive or synergistic suppression of tumor growth, non-steroidal anti-inflammatory drugs (NSAIDs), cyclooxygenase-2 (COX-2) inhibitors, steroids, TNF antagonists (e.g.. Remicade® and Enbrel®), interferon-β1a (Avonex®), and interferon-β1b (Betaseron®) as well as combinations of one or more of the foreoing as practied in known chemotherapeutic treatment regimens including but not limited to TAC, FOLFOX, TPC, FEC, ADE, FOLFOX-6, EPOCH, CHOP, CMF, CVP, BEP, OFF, FLOX, CVD, TC, FOLFIRI, PCV, FOLFOXIRI, ICE-V, XELOX, and others that are readily appreciated by the skilled clinician in the art.

[0444] In some embodiments, the binding protein is administered in combination with BRAF/MEK inhibitors, kinase inhibitors such as sunitinib, PARP inhibitors such as olaparib, EGFR inhibitors such as osimertinib (Ahn, et al. (2016) J Thorac Oncol 11:S115), IDO inhibitors such as epacadostat, and oncolytic viruses such as talimogene laherparepvec (T-VEC).

Combination with Therapeutic Antibodies

[0445] In some embodiments, a “supplementary agent” is a therapeutic antibody (including bi-specific and tri-specific antibodies which bind to one or more tumor associated antigens including but not limited to bispecific T cell engagers (BITEs), dual affinity retargeting (DART) constructs, and trispecific killer engager (TriKE) constructs).

[0446] In some embodiments, the therapeutic antibody is an antibody that binds to at least one tumor antigen selected from the group consisting of HER2 (e.g. trastuzumab, pertuzumab, ado-trastuzumab emtansine), nectin-4 (e.g. enfortumab), CD79 (e.g. polatuzumab vedotin), CTLA4 (e.g. ipilumumab), CD22 (e.g. moxetumomab pasudotox), CCR4 (e.g. magamuizumab), IL23p19 (e.g. tildrakizumab), PDL1 (e.g. durvalumab, avelumab, atezolizumab), IL17a (e.g. ixekizumab), CD38 (e.g. daratumumab), SLAMF7 (e.g. elotuzumab), CD20 (e.g. rituximab, tositumomab, ibritumomab and ofatumumab), CD30 (e.g. brentuximab vedotin), CD33 (e.g. gemtuzumab ozogamicin), CD52 (e.g. alemtuzumab), EpCam, CEA, fpA33, TAG-72, CAIX, PSMA, PSA, folate binding protein, GD2 (e.g. dinuntuximab), GD3, IL6 (e.g. silutxumab) GM2, Ley, VEGF (e.g. bevacizumab), VEGFR, VEGFR2 (e.g. ramucirumab), PDGFRα (e.g. olartumumab), EGFR (e.g. cetuximab, panittunurnab and necittuntunab), ERBB2 (e.g. trasturtunab), ERBB3, MET, IGF1R, EPHA3, TRAIL R1, TRAIL R2, RANKL RAP, tenascin, integrin αVβ3, and integrin α4β1.

[0447] Examples of antibody therapeutics which are FDA approved and may be used as supplementary agents for use in the treatment of neoplastic disease indication include those provided in Table 5 below.

TABLE 5
FDA Antineoplastic Disease Antibodies and Indications

| Name | Tradename(s) | Target; format | Indication |
|---|---|---|---|
| [fam]-trastuzumab | Enhertu | HER2; Humanized IgG1 ADC | HER2+ breast cancer |
| deruxtecan | | | |
| Enfortumab vedotin | Padcev | Nectin-4; Human IgG1 ADC | Urothelial cancer |
| Polatuzumab vedotin | Polivy | CD79b; Humanized IgG1 ADC | Diffuse large B-cell lymphoma |
| Cemiplimab | Libtayo | PD-1; Human mAb | Cutaneous squamous cell carcinoma |
| Moxetumomab | Lumoxiti | CD22; Murine IgG1 dsFv | Hairy cell leukemia |
| pasudotox | | immunotoxin | |
| Mogamuizumab | Poteligeo | CCR4; Humanized IgG1 | Cutaneous T cell lymphoma |
| Tildrakizumab | Ilumya | IL23p19; Humanized IgG1 | Plaque psoriasis |
| Ibalizumab | Trogarzo | CD4; Humanized IgG4 | HIV infection |
| Durvalumab | IMFINZI | PD-L1; Human IgG1 | Bladder cancer |
| Inotuzumab | BESPONSA | CD22; Humanized IgG4, ADC | Hematological malignancy |
| ozogamicin | | | |
| Avelumab | Bavencio | PD-L1; Human IgG1 | Merkel cell carcinoma |
| Atezolizumab | Tecentriq | PD-L1; Humanized IgG1 | Bladder cancer |
| Olaratumab | Lartruvo | PDGRFα; Human IgG1 | Soft tissue sarcoma |
| Ixekizumab | Taltz | IL17a; Humanized IgG4 | Psoriasis |
| Daratumumab | Darzalex | CD38; Human IgG1 | Multiple myeloma |
| Elotuzumab | Empliciti | SLAMF7; Humanized IgG1 | Multiple myeloma |
| Necitumumab | Portrazza | EGFR; Human IgG1 | Non-small cell lung cancer |
| Dinutuximab | Unituxin | GD2; Chimeric IgG1 | Neuroblastoma |
| Nivolumab | Opdivo | PD1; Human IgG4 | Melanoma, non-small cell lung |
| | | | cancer |
| Blinatumomab | Blincyto | CD19, CD3; Murine bispecific | Acute lymphoblastic leukemia |
| | | tandem scFv | |
| Pembrolizumab | Keytruda | PD1; Humanized IgG4 | Melanoma |
| Ramucirumab | Cyramza | VEGFR2; Human IgG1 | Gastric cancer |
| Siltuximab | Sylvant | IL6; Chimeric IgG1 | Castleman disease |
| Obinutuzumab | Gazyva | CD20; Humanized IgG1; | Chronic lymphocytic leukemia |
| | | Glycoengineered | |
| Ado-trastuzumab | Kadcyla | HER2; Humanized IgG1, ADC | Breast cancer |
| emtansine | | | |
| Pertuzumab | Perjeta | HER2; Humanized IgG1 | Breast Cancer |
| Brentuximab vedotin | Adcetris | CD30; Chimeric IgG1, ADC | Hodgkin lymphoma, systemic |
| | | | anaplastic large cell lymphoma |
| Ipilimumab | Yervoy | CTLA-4; Human IgG1 | Metastatic melanoma |
| Ofatumumab | Arzerra | CD20; Human IgG1 | Chronic lymphocytic leukemia |
| Certolizumab pegol | Cimzia | TNF; Humanized Fab, pegylated | Crohn disease |
| Catumaxomab | Removab | EPCAM/CD3; Rat/mouse | Malignant ascites |
| | | bispecific mAb | |
| Panitumumab | Vectibix | EGFR; Human IgG2 | Colorectal cancer |
| Bevacizumab | Avastin | VEGF; Humanized IgG1 | Colorectal cancer |
| Cetuximab | Erbitux | EGFR; Chimeric IgG1 | Colorectal cancer |
| Tositumomab-I131 | Bexxar | CD20; Murine IgG2a | Non-Hodgkin lymphoma |
| Ibritumomab tiuxetan | Zevalin | CD20; Murine IgG1 | Non-Hodgkin lymphoma |
| Gemtuzumab | Mylotarg | CD33; Humanized IgG4, ADC | Acute myeloid leukemia |
| ozogamicin | | | |
| Trastuzumab | Herceptin | HER2; Humanized IgG1 | Breast cancer |
| Infliximab | Remicade | TNF; Chimeric IgG1 | Crohn disease |
| Rituximab | Mab Thera, Rituxan | CD20; Chimeric IgG1 | Non-Hodgkin lymphoma |
| Edrecolomab | Panorex | EpCAM; Murine IgG2a | Colorectal cancer |

[0448] In some embodiments, where the antibody is a bispecific antibody targeting a first and second tumor antigen such as HER2 and HER3 (abbreviated HER2×HER3), FAP×DR-5 bispecific antibodies, CEA×CD3 bispecific antibodies, CD20×CD3 bispecific antibodies, EGFR-EDV-miR16 trispecific antibodies, gp100×CD3 bispecific antibodies, Ny-eso×CD3 bispecific antibodies, EGFR×cMet bispecific antibodies, BCMA×CD3 bispecific antibodies, EGFR-EDV bispecific antibodies, CLEC12A×CD3 bispecific antibodies, HER2×HER3 bispecific antibodies, Lgr5×EGFR bispecific antibodies, PD1×CTLA-4 bispecific antibodies, CD123×CD3 bispecific antibodies, gpA33×CD3 bispecific antibodies, B7-H3×CD3 bispecific antibodies, LAG-3×PD1 bispecific antibodies, DLL4×VEGF bispecific antibodies, Cadherin-P×CD3 bispecific antibodies, BCMA×CD3 bispecific antibodies, DLL4×VEGF bispecific antibodies, CD20×CD3 bispecific antibodies, Ang-2×VEGF-A bispecific antibodies,

[0449] CD20×CD3 bispecific antibodies, CD123×CD3 bispecific antibodies, SSTR2×CD3 bispecific antibodies, PD1×CTLA-4 bispecific antibodies, HER2×HER2 bispecific antibodies, GPC3×CD3 bispecific antibodies, PSMA×CD3 bispecific antibodies, LAG-3×PD-L1 bispecific antibodies, CD38×CD3 bispecific antibodies, HER2×CD3 bispecific antibodies, GD2×CD3 bispecific antibodies, and CD33×CD3 bispecific antibodies.

[0450] Such therapeutic antibodies may be further conjugated to one or more chemotherapeutic agents (e.g., antibody drug conjugates or ADCs) directly or through a linker, especially acid, base or enzymatically labile linkers.

Combination with Physical Methods

[0451] In some embodiments, a supplementary agent is one or more non-pharmacological modalities (e.g., localized radiation therapy or total body radiation therapy or surgery). By way of example, the present disclosure contemplates treatment regimens wherein a radiation phase is preceded or followed by treatment with a treatment regimen comprising a binding protein and one or more supplementary agents. In some embodiments, the present disclosure further contemplates the use of a binding protein in combination with surgery (e.g. tumor resection). In some embodiments, the present disclosure further contemplates the use of a binding protein in combination with bone marrow transplantation, peripheral blood stem cell transplantation or other types of transplantation therapy.

Combination with Immune Checkpoint Modulators:

[0452] In some embodiments, a “supplementary agent” is an immune checkpoint modulator for the treatment and/or prevention neoplastic disease in a subject as well as diseases, disorders or conditions associated with neoplastic disease. The term “immune checkpoint pathway” refers to biological response that is triggered by the binding of a first molecule (e.g. a protein such as PD1) that is expressed on an antigen presenting cell (APC) to a second molecule (e.g. a protein such as PDL1) that is expressed on an immune cell (e.g. a T-cell) which modulates the immune response, either through stimulation (e.g. upregulation of T-cell activity) or inhibition (e.g. downregulation of T-cell activity) of the immune response. The molecules that are involved in the formation of the binding pair that modulate the immune response are commonly referred to as “immune checkpoints.” The biological responses modulated by such immune checkpoint pathways are mediated by intracellular signaling pathways that lead to downstream immune effector pathways, such as cell activation, cytokine production, cell migration, cytotoxic factor secretion, and antibody production. Immune checkpoint pathways are commonly triggered by the binding of a first cell surface expressed molecule to a second cell surface molecule associated with the immune checkpoint pathway (e.g. binding of PD1 to PDL1, CTLA4 to CD28, etc.). The activation of immune checkpoint pathways can lead to stimulation or inhibition of the immune response.

[0453] An immune checkpoint whose activation results in inhibition or downregulation of the immune response is referred to herein as a “negative immune checkpoint pathway modulator.” The inhibition of the immune response resulting from the activation of a negative immune checkpoint modulator diminishes the ability of the host immune system to recognize foreign antigen such as a tumor-associated antigen. The term negative immune checkpoint pathway includes, but is not limited to, biological pathways modulated by the binding of PD1 to PDL1, PD1 to PDL2, and CTLA4 to CDCD80/86. Examples of such negative immune checkpoint antagonists include but are not limited to antagonists (e.g. antagonist antibodies) that bind T-cell inhibitory receptors including but not limited to PD1 (also referred to as CD279), TIM3 (T-cell membrane protein 3; also known as HAVcr2), BTLA (B and T lymphocyte attenuator; also known as CD272), the VISTA (B7-H5) receptor, LAG3 (lymphocyte activation gene 3; also known as CD233) and CTLA4 (cytotoxic T-lymphocyte associated antigen 4; also known as CD152).

[0454] In one embodiment, an immune checkpoint pathway the activation of which results in stimulation of the immune response is referred to herein as a “positive immune checkpoint pathway modulator.” The term positive immune checkpoint pathway modulator includes, but is not limited to, biological pathways modulated by the binding of ICOSL to ICOS(CD278), B7-H6 to NKp30, CD155 to CD96, OX40L to OX40, CD70 to CD27, CD40 to CD40L, and GITRL to GITR. Molecules which agonize positive immune checkpoints (such natural or synthetic ligands for a component of the binding pair that stimulates the immune response) are useful to upregulate the immune response. Examples of such positive immune checkpoint agonists include but are not limited to agonist antibodies that bind T-cell activating receptors such as ICOS (such as JTX-2011, Jounce Therapeutics), OX40 (such as MEDI6383, Medimmune), CD27 (such as varlilumab, Celldex Therapeutics), CD40 (such as dacetuzmumab CP-870,893, Roche, Chi Lob 7/4), HVEM, CD28, CD137 4-1BB, CD226, and GITR (such as MEDI1873, Medimmune; INCAGN 1876, Agenus).

[0455] As used herein, the term “immune checkpoint pathway modulator” refers to a molecule that inhibits or stimulates the activity of an immune checkpoint pathway in a biological system including an immunocompetent mammal. An immune checkpoint pathway modulator may exert its effect by binding to an immune checkpoint protein (such as those immune checkpoint proteins expressed on the surface of an antigen presenting cell (APC) such as a cancer cell and/or immune T effector cell) or may exert its effect on upstream and/or downstream reactions in the immune checkpoint pathway. For example, an immune checkpoint pathway modulator may modulate the activity of SHP2, a tyrosine phosphatase that is involved in PD-1 and CTLA-4 signaling. The term “immune checkpoint pathway modulators” encompasses both immune checkpoint pathway modulator(s) capable of down-regulating at least partially the function of an inhibitory immune checkpoint (referred to herein as an “immune checkpoint pathway inhibitor” or “immune checkpoint pathway antagonist”) and immune checkpoint pathway modulator(s) capable of up-regulating at least partially the function of a stimulatory immune checkpoint (referred to herein as an “immune checkpoint pathway effector” or “immune checkpoint pathway agonist.”).

[0456] The immune response mediated by immune checkpoint pathways is not limited to T-cell mediated immune response. For example, the KIR receptors of NK cells modulate the immune response to tumor cells mediated by NK cells. Tumor cells express a molecule called HLA-C, which inhibits the KIR receptors of NK cells leading to a dimunition or the anti-tumor immune response. The administration of an agent that antagonizes the binding of HLA-C to the KIR receptor such an anti-KIR3 mab (e.g. lirilumab, BMS) inhibits the ability of HLA-C to bind the NK cell inhibitory receptor (KIR) thereby restoring the ability of NK cells to detect and attack cancer cells. Thus, the immune response mediated by the binding of HLA-C to the KIR receptor is an example a negative immune checkpoint pathway the inhibition of which results in the activation of a of non-T-cell mediated immune response.

[0457] In one embodiment, the immune checkpoint pathway modulator is a negative immune checkpoint pathway inhibitor/antagonist. In another embodiment, immune checkpoint pathway modulator employed in combination with the binding protein is a positive immune checkpoint pathway agonist. In another embodiment, immune checkpoint pathway modulator employed in combination with the binding protein is an immune checkpoint pathway antagonist.

[0458] The term “negative immune checkpoint pathway inhibitor” refers to an immune checkpoint pathway modulator that interferes with the activation of a negative immune checkpoint pathway resulting in the upregulation or enhancement of the immune response. Exemplary negative immune checkpoint pathway inhibitors include but are not limited to programmed death-1 (PD1) pathway inhibitors, programed death ligand-1 (PDL1) pathway inhibitors, TIM3 pathway inhibitors and anti-cytotoxic T-lymphocyte antigen 4 (CTLA4) pathway inhibitors.

[0459] In one embodiment, the immune checkpoint pathway modulator is an antagonist of a negative immune checkpoint pathway that inhibits the binding of PD1 to PDL1 and/or PDL2 (“PD1 pathway inhibitor”). PD1 pathway inhibitors result in the stimulation of a range of favorable immune response such as reversal of T-cell exhaustion, restoration cytokine production, and expansion of antigen-dependent T-cells. PD1 pathway inhibitors have been recognized as effective variety of cancers receiving approval from the USFDA for the treatment of variety of cancers including melanoma, lung cancer, kidney cancer, Hodgkins lymphoma, head and neck cancer, bladder cancer and urothelial cancer.

[0460] The term PD1 pathway inhibitors includes monoclonal antibodies that interfere with the binding of PD1 to PDL1 and/or PDL2. Antibody PD1 pathway inhibitors are well known in the art. Examples of commercially available PD1 pathway inhibitors that monoclonal antibodies that interfere with the binding of PD1 to PDL1 and/or PDL2 include nivolumab (Opdivo®, BMS-936558, MDX1106, commercially available from BristolMyers Squibb, Princeton NJ), pembrolizumab (Keytruda® MK-3475, lambrolizumab, commercially available from Merck and Company, Kenilworth NJ), and atezolizumab (Tecentriq®, Genentech/Roche, South San Francisco CA). Additional PD1 pathway inhibitors antibodies are in clinical development including but not limited to durvalumab (MEDI4736, Medimmune/AstraZeneca), pidilizumab (CT-011, CureTech), PDR001 (Novartis), BMS-936559 (MDX1105, BristolMyers Squibb), and avelumab (MSB0010718C, Merck Serono/Pfizer) and SHR-1210 (Incyte). Additional antibody PD1 pathway inhibitors are described in U.S. Pat. No. 8,217,149 (Genentech, Inc) issued Jul. 10, 2012; U.S. Pat. No. 8,168,757 (Merck Sharp and Dohme Corp.) issued May 1, 2012, U.S. Pat. No. 8,008,449 (Medarex) issued Aug. 30, 2011, U.S. Pat. No. 7,943,743 (Medarex, Inc) issued May 17, 2011.

[0461] The term PD1 pathway inhibitors are not limited to antagonist antibodies. Non-antibody biologic PD1 pathway inhibitors are also under clinical development including AMP-224, a PD-L2 IgG2a fusion protein, and AMP-514, a PDL2 fusion protein, are under clinical development by Amplimmune and Glaxo SmithKline. Aptamer compounds are also described in the literature useful as PD1 pathway inhibitors (Wang, et al. (2018) 145:125-130.).

[0462] The term PD1 pathway inhibitors includes peptidyl PD1 pathway inhibitors such as those described in Sasikumar, et al., U.S. Pat. No. 9,422,339 issued Aug. 23, 2016, and Sasilkumar, et al., U.S. Pat. No. 8,907,053 issued Dec. 9, 2014. CA-170 (AUPM-170, Aurigene/Curis) is reportedly an orally bioavailable small molecule targeting the immune checkpoints PDL1 and VISTA. Pottayil Sasikumar, et al. Oral immune checkpoint antagonists targeting PD-L1/VISTA or PD-L1/Tim3 for cancer therapy. [abstract]. In: Proceedings of the 107th Annual Meeting of the American Association for Cancer Research; 2016 Apr 16-20; New Orleans, LA. Philadelphia (PA): AACR; Cancer Res 2016; 76(14 Suppl): Abstract No. 4861. CA-327 (AUPM-327, Aurigene/Curis) is reportedly an orally available, small molecule that inhibit the immune checkpoints, Programmed Death Ligand-1 (PDL1) and T-cell immunoglobulin and mucin domain containing protein-3 (TIM3).

[0463] The term PD1 pathway inhibitors includes small molecule PD1 pathway inhibitors. Examples of small molecule PD1 pathway inhibitors useful in the practice of the present invention are described in the art including Sasikumar, et al., 1,2,4-oxadiazole and thiadiazole compounds as immunomodulators (PCT/IB2016/051266 filed Mar. 7, 2016, published as WO2016142833A1 Sep. 15, 2016) and Sasikumar, et al. 3-substituted-1,2,4-oxadiazole and thiadiazole PCT/IB2016/051343 filed Mar. 9, 2016 and published as WO2016142886A2), BMS-1166 and Chupak L S and Zheng X. Compounds useful as immunomodulators. Bristol-Myers Squibb Co. (2015) WO 2015/034820 A1, EP3041822 B1 granted Aug. 9, 2017; WO2015034820 Al; and Chupak, et al. Compounds useful as immunomodulators. Bristol-Myers Squibb Co. (2015) WO 2015/160641 A2. WO 2015/160641 A2, Chupak, et al. compounds useful as immunomodulators. Bristol-Myers Squibb Co. Sharpe, et al. Modulators of immunoinhibitory receptor PD-1, and methods of use thereof, WO 2011082400 A2 published Jul. 7, 2011; U.S. Pat. No. 7,488,802 (Wyeth) issued Feb. 10, 2009;

[0464] In some embodiments, combination of binding proteins described herein and one or more PD1 immune checkpoint modulators are useful in the treatment of neoplastic conditions for which PD1 pathway inhibitors have demonstrated clinical effect in human beings either through FDA approval for treatment of the disease or the demonstration of clinical efficacy in clinical trials including but not limited to melanoma, non-small cell lung cancer, small cell lung cancer, head and neck cancer, renal cell cancer, bladder cancer, ovarian cancer, uterine endometrial cancer, uterine cervical cancer, uterine sarcoma, gastric cancer, esophageal cancer, DNA mismatch repair deficient colon cancer, DNA mismatch repair deficient endometrial cancer, hepatocellular carcinoma, breast cancer, Merkel cell carcinoma, thyroid cancer, Hodgkins lymphoma, follicular lymphoma, diffuse large B-cell lymphoma, mycosisfungoides, peripheral T-cell lymphoma. In some embodiments, the combination of binding proteins and an PD1 immune checkpoint modulator is useful in the treatment of tumors characterized by high levels of expression of PDL1, where the tumor has a tumor mutational burden, where there are high levels of CD8⁺ T-cell in the tumor, an immune activation signature associated with IFNγ and the lack of metastatic disease particularly liver metastasis.

[0465] In some embodiments, the binding protein is administered in combination with an antagonist of a negative immune checkpoint pathway that inhibits the binding of CTLA4 to CD28 (“CTLA4 pathway inhibitor”). Examples of CTLA4 pathway inhibitors are well known in the art (See, e.g., U.S. Pat. No. 6,682,736 (Abgenix) issued Jan. 27, 2004; U.S. Pat. No. 6,984,720 (Medarex, Inc.) issued May 29, 2007; U.S. Pat. No. 7,605,238 (medarex, Inc.) issued Oct. 20, 2009)

[0466] In some embodiments, the binding protein is administered in combination with an antagonist of a negative immune checkpoint pathway that inhibits the binding of BTLA to HVEM (“BTLA pathway inhibitor”). A number of approaches targeting the BTLA/HVEM pathway using anti-BTLA antibodies and antagonistic HVEM-Ig have been evaluated, and such approaches have suggested promising utility in a number of diseases, disorders and conditions, including transplantation, infection, tumor, and autoimmune disease (See e.g. Wu, et al., (2012) Int. J. Biol. Sci. 8:1420-30).

[0467] In some embodiments, the binding protein is administered in combination with an antagonist of a negative immune checkpoint pathway that inhibits the ability TIM3 to binding to TIM3-activating ligands (“TIM3 pathway inhibitor”). Examples of TIM3 pathway inhibitors are known in the art and with representative non-limiting examples described in United States Patent Publication No. PCT/US2016/021005 published Sep. 15, 2016; Lifke, et al. United States Patent Publication No. US 20160257749 A1 published Sep. 8, 2016 (F. Hoffman-LaRoche), Karunsky, U.S. Pat. No. 9,631,026 issued Apr. 27, 2017; Karunsky, Sabatos-Peyton, et al. U.S. Pat. No. 8,841,418 issued Sep. 23, 2014; U.S. Pat. No. 9,605,070; Takayanagi, et al., U.S. Pat. No. 8,552,156 issued Oct. 8, 2013.

[0468] In some embodiments, the binding protein is administered in combination with an inhibitor of both LAG3 and PD1 as the blockade of LAG3 and PD1 has been suggested to synergistically reverse energy among tumor-specific CD8⁺ T-cells and virus-specific CD8⁺ T-cells in the setting of chronic infection. IMP321 (ImmuFact) is being evaluated in melanoma, breast cancer, and renal cell carcinoma. See generally Woo et al., (2012) Cancer Res 72:917-27; Goldberg et al., (2011) Curr. Top. Microbiol. Immunol. 344:269-78; Pardoll (2012) Nature Rev. Cancer 12:252-64; Grosso et al., (2007) J. Clin. Invest. 117:3383-392.

[0469] In some embodiments, the binding protein is administered in combination with an A2aR inhibitor. A2aR inhibits T-cell responses by stimulating CD4⁺ T-cells towards developing into T_{reg} cells. A2aR is particularly important in tumor immunity because the rate of cell death in tumors from cell turnover is high, and dying cells release adenosine, which is the ligand for A2aR. In addition, deletion of A2aR has been associated with enhanced and sometimes pathological inflammatory responses to infection. Inhibition of A2aR can be effected by the administration of molecules such as antibodies that block adenosine binding or by adenosine analogs. Such agents may be used in combination with the binding proteins for use in the treatment disorders such as cancer and Parkinson's disease.

[0470] In some embodiments, the binding protein is administered in combination with an inhibitor of IDO (Indoleamine 2,3-dioxygenase). IDO down-regulates the immune response mediated through oxidation of tryptophan resulting in in inhibition of T-cell activation and induction of T-cell apoptosis, creating an environment in which tumor-specific cytotoxic T lymphocytes are rendered functionally inactive or are no longer able to attack a subject's cancer cells. Indoximod (NewLink Genetics) is an IDO inhibitor being evaluated in metastatic breast cancer.

[0471] As previously described, the present invention provides for a method of treatment of neoplastic disease (e.g., cancer) in a mammalian subject by the administration of a binding protein in combination with an agent(s) that modulate at least one immune checkpoint pathway including immune checkpoint pathway modulators that modulate two, three or more immune checkpoint pathways.

[0472] In some embodiments the binding protein is administered in combination with an immune checkpoint modulator that is capable of modulating multiple immune checkpoint pathways. Multiple immune checkpoint pathways may be modulated by the administration of multi-functional molecules which are capable of acting as modulators of multiple immune checkpoint pathways. Examples of such multiple immune checkpoint pathway modulators include but are not limited to bi-specific or poly-specific antibodies. Examples of poly-specific antibodies capable of acting as modulators or multiple immune checkpoint pathways are known in the art. For example, United States Patent Publication No. 2013/0156774 describes bispecific and multispecific agents (e.g., antibodies), and methods of their use, for targeting cells that co-express PD1 and TIM3. Moreover, dual blockade of BTLA and PD1 has been shown to enhance antitumor immunity (Pardoll, (April 2012) Nature Rev. Cancer 12:252-64). The present disclosure contemplates the use of binding proteins in combination with immune checkpoint pathway modulators that target multiple immune checkpoint pathways, including but limited to bi-specific antibodies which bind to both PD1 and LAG3. Thus, antitumor immunity can be enhanced at multiple levels, and combinatorial strategies can be generated in view of various mechanistic considerations.

[0473] In some embodiments, the binding protein may be administered in combination with two, three, four or more checkpoint pathway modulators. Such combinations may be advantageous in that immune checkpoint pathways may have distinct mechanisms of action, which provides the opportunity to attack the underlying disease, disorder or conditions from multiple distinct therapeutic angles.

[0474] It should be noted that therapeutic responses to immune checkpoint pathway inhibitors often manifest themselves much later than responses to traditional chemotherapies such as tyrosine kinase inhibitors. In some instance, it can take six months or more after treatment initiation with immune checkpoint pathway inhibitors before objective indicia of a therapeutic response are observed. Therefore, a determination as to whether treatment with an immune checkpoint pathway inhibitors(s) in combination with a binding protein of the present disclosure must be made over a time-to-progression that is frequently longer than with conventional chemotherapies. The desired response can be any result deemed favorable under the circumstances. In some embodiments, the desired response is prevention of the progression of the disease, disorder or condition, while in other embodiments the desired response is a regression or stabilization of one or more characteristics of the disease, disorder or conditions (e.g., reduction in tumor size). In still other embodiments, the desired response is reduction or elimination of one or more adverse effects associated with one or more agents of the combination.

### Cell Therapy Agents and Methods as Supplementary Agents

[0475] In some embodiments, the methods of the disclosure may include the combination of the administration of a binding protein with supplementary agents in the form of cell therapies for the treatment of neoplastic, autoimmune or inflammatory diseases. Examples of cell therapies that are amenable to use in combination with the methods of the present disclosure include but are not limited to engineered T cell products comprising one or more activated CAR-T cells, engineered TCR cells, tumor infiltrating lymphocytes (TILs), engineered Treg cells. As engineered T-cell products are commonly activated ex vivo prior to their administration to the subject and therefore provide upregulated levels of CD25, cell products comprising such activated engineered T cells types are amenable to further support via the administration of a CD25 biased binding protein as described herein.

### CAR-T Cells

[0476] In some embodiments of the methods of the present disclosure, the supplementary agent is a “chimeric antigen receptor T-cell” and “CAR-T cell” are used interchangeably to refer to a T-cell that has been recombinantly modified to express a chimeric antigen receptor. As used herein, the terms As used herein, the terms “chimeric antigen receptor” and “CAR” are used interchangeably to refer to a chimeric polypeptide comprising multiple functional domains arranged from amino to carboxy terminus in the sequence: (a) an antigen binding domain (ABD), (b) a transmembrane domain (TD); and (c) one or more cytoplasmic signaling domains (CSDs) wherein the foregoing domains may optionally be linked by one or more spacer domains. The CAR may also further comprise a signal peptide sequence which is conventionally removed during post-translational processing and presentation of the CAR on the cell surface of a cell transformed with an expression vector comprising a nucleic acid sequence encoding the CAR CARs useful in the practice of the present invention are prepared in accordance with principles well known in the art. See e.g., Eshhaar et al. U.S. Pat. No. 7,741,465 B1 issued Jun. 22, 2010; Sadelain, et al (2013) Cancer Discovery 3(4):388-398; Jensen and Riddell (2015) Current Opinions in Immunology 33:9-15; Gross, et al. (1989) PNAS(USA) 86(24):10024-10028; Curran, et al. (2012) J Gene Med 14(6):405-15. Examples of commercially available CAR-T cell products that may be modified to incorporate an orthogonal receptor of the present invention include axicabtagene ciloleucel (marketed as Yescarta® commercially available from Gilead Pharmaceuticals) and tisagenlecleucel (marketed as Kymriah® commercially available from Novartis).

[0477] As used herein, the term antigen binding domain (ABD) refers to a polypeptide that specifically binds to an antigen expressed on the surface of a target cell. The ABD may be any polypeptide that specifically binds to one or more cell surface molecules (e.g. tumor antigens) expressed on the surface of a target cell. In some embodiments, the ABD is a polypeptide that specifically binds to a cell surface molecule associated with a tumor cell is selected from the group consisting of GD2, BCMA, CD19, CD33, CD38, CD70, GD2, IL3Rα2, CD19, mesothelin, Her2, EpCam, Mucl, ROR1, CD133, CEA, EGRFRVIII, PSCA, GPC3, Pan-ErbB and FAP. In some embodiments, the ABD is an antibody (as defined hereinabove to include molecules such as one or more V_{H}Hs, scFvs, etc.) that specifically binds to at least one cell surface molecule associated with a tumor cell (i.e. at least one tumor antigen) wherein the cell surface molecule associated with a tumor cell is selected from the group consisting of GD2, BCMA, CD19, CD33, CD38, CD70, GD2, IL3Rα2, CD19, mesothelin, Her2, EpCam, Mucl, ROR1, CD133, CEA, EGRFRVIII, PSCA, GPC3, Pan-ErbB and FAP. Examples of CAR-T cells useful as supplementary agents in the practice of the methods of the present disclosure include but are not limited to CAR-T cells expressing CARs comprising an ABD further comprising at least one of: anti-GD2 antibodies, anti-BCMA antibodies, anti-CD19 antibodies, anti-CD33 antibodies, anti-CD38 antibodies, anti-CD70 antibodies, anti-GD2 antibodies and IL3Rα2 antibodies, anti-CD19 antibodies, anti-mesothelin antibodies, anti-Her2 antibodies, anti-EpCam antibodies, anti-Mucl antibodies, anti-ROR1 antibodies, anti-CD133 antibodies, anti-CEA antibodies, anti-PSMA antibodies, anti-EGRFRVIII antibodies, anti-PSCA antibodies, anti-GPC3 antibodies, anti-Pan-ErbB antibodies, anti-FAP antibodies,

[0478] CARs of CAR-T cells useful in the practice of the methods of the present disclosure further comprise a transmembrane domain joining the ABD (or linker, if employed, see discussion of linkers below) to the intracellular cytoplasmic domain of the CAR The transmembrane domain is comprised of any polypeptide sequence which is thermodynamically stable in a eukaryotic cell membrane. The transmembrane spanning domain may be derived from the transmembrane domain of a naturally occurring membrane spanning protein or may be synthetic. In designing synthetic transmembrane domains, amino acids favoring alpha-helical structures are preferred. Transmembrane domains useful in construction of CARs are comprised of approximately 10, 11, 12, 13, 14, 15, 16, 17, 18, 19, 20, 21, 22, 22, 23, or 24 amino acids favoring the formation having an alpha-helical secondary structure. Amino acids having a to favor alpha-helical conformations are well known in the art. See, e.g Pace, et al. (1998) Biophysical Journal 75: 422-427. Amino acids that are particularly favored in alpha helical conformations include methionine, alanine, leucine, glutamate, and lysine. In some embodiments, the CAR transmembrane domain may be derived from the transmembrane domain from type I membrane spanning proteins, such as CD3ζ, CD4, CD8, CD28, etc.

[0479] The cytoplasmic domain of the CAR polypeptide comprises one or more intracellular signal domains. In one embodiment, the intracellular signal domains comprise the cytoplasmic sequences of the T-cell receptor (TCR) and co-receptors that initiate signal transduction following antigen receptor engagement and functional derivatives and sub-fragments thereof. A cytoplasmic signaling domain, such as those derived from the T cell receptor zeta-chain, is employed as part of the CAR in order to produce stimulatory signals for T lymphocyte proliferation and effector function following engagement of the chimeric receptor with the target antigen. Examples of cytoplasmic signaling domains include but are not limited to the cytoplasmic domain of CD27, the cytoplasmic domain S of CD28, the cytoplasmic domain of CD137 (also referred to as 4-1BB and TNFRSF9), the cytoplasmic domain of CD278 (also referred to as ICOS), p110α, β, or δ catalytic subunit of PI3 kinase, the human CD3 ζ− chain, cytoplasmic domain of CD134 (also referred to as OX40 and TNFRSF4), FcεR1γ and β chains, MB1 (Igα) chain, B29 (Igβ) chain, etc.), CD3 polypeptides (δ, Δ and ε), syk family tyrosine kinases (Syk, ZAP 70, etc.), src family tyrosine kinases (Lck, Fyn, Lyn, etc.) and other molecules involved in T-cell transduction, such as CD2, CD5 and CD28.

[0480] In some embodiments, the CAR may also provide a co-stimulatory domain. The term “co-stimulatory domain” (“CSD”), refers to a stimulatory domain, typically an endodomain, of a CAR that provides a secondary non-specific activation mechanism through which a primary specific stimulation is propagated. The co-stimulatory domain refers to the portion of the CAR which enhances the proliferation, survival or development of memory cells. Examples of co-stimulation include antigen nonspecific T cell co-stimulation following antigen specific signaling through the T cell receptor and antigen nonspecific B cell co-stimulation following signaling through the B cell receptor. Co-stimulation, e.g., T cell co-stimulation, and the factors involved are described in Chen & Flies (2013) Nat Rev Immunol 13(4):227-42. In some embodiments of the present disclosure, the CSD comprises one or more of members of the TNFR superfamily, CD28, CD137 (4-1BB), CD134 (OX40), Dap10, CD27, CD2, CD5, ICAM-1, LFA-1 (CD11a/CD18), Lck, TNFR-I, TNFR-II, Fas, CD30, CD40 or combinations thereof.

[0481] CARs useful in the practice of the methods of the present disclosure may optionally include one or more polypeptide spacers linking the domains of the CAR, in particular the linkage between the ABD to the transmembrane spanning domain of the CAR. Although not an essential element of the CAR structure, the inclusion of a spacer domain is generally considered desirable to facilitate antigen recognition by the ARD. As used in conjunction with the CAR-T cell technology described herein, the terms “linker”, “linker domain” and “linker region” refer to a polypeptide from about 1 to 100 amino acids in length. Linkers are typically be composed of amino acid residues which permit flexibility of the polypeptide (e.g. glycine and serine) so that the adjacent domains of the CAR are provided greater freedom of movement relative to one another. Although there is no particularly defined length or sequence of amino acids that is necessary for the spacer to achieve its function, but the typical properties of the spacer are flexibility to enable freedom of movement of the ABD to facilitate targeting antigen recognition. Similarly, it has been found that there is there is substantial leniency in spacer length while retaining CAR function. Jensen and Riddell (2014) Immunol. Review 257(1) 127-144. Sequences useful as spacers in the construction of CARs useful in the practice of the present invention include but are not limited to the hinge region of IgG1, the immunoglobulin 1 CH2-CH3 region, IgG4 hinge-CH2-CH3, IgG4 hinge-CH3, and the IgG4 hinge. The hinge and transmembrane domains may be derived from the same molecule such as the hinge and transmembrane domains of CD8-alpha. Imai, et al. (2004) Leukemia 18(4):676-684.

[0482] CARs are often referred to as first, second, third or fourth generation. The term first-generation CAR refers to a CAR wherein the cytoplasmic domain transmits the signal from antigen binding through only a single signaling domain, for example a signaling domain derived from the high-affinity receptor for IgE FcεR1γ or the CD3ζ chain. The domain contains one or three immunoreceptor tyrosine-based activating motif(s) [ITAM(s)] for antigen-dependent T-cell activation. The ITAM-based activating signal endows T-cells with the ability to lyse the target tumor cells and secret cytokines in response to antigen binding. Second-generation CARs include a co-stimulatory signal in addition to the CD3ζ signal. Coincidental delivery of the co-stimulatory signal enhances cytokine secretion and antitumor activity induced by CAR-transduced T-cells. The co-stimulatory domain is usually be membrane proximal relative to the CD3ζ domain. Third-generation CARs include a tripartite signaling domain, comprising for example a CD28, CD3ζ, OX40 or 4-1BB signaling region. In fourth generation, or “armored car” CAR T-cells are further modified to express or block molecules and/or receptors to enhance immune activity such as the expression of IL12, IL18, IL7, and/or IL10; 4-1BB ligand, CD-40 ligand. Examples of intracellular signaling domains comprising may be incorporated into the CAR of the present invention include (amino to carboxy): CD3ζ; CD28-41BB-CD3ζ; CD28-OX40-CD3ζ; CD28-41BB-CD3ζ; 41BB-CD-28-CD3ζ and 41BB-CD3ζ.

[0483] The term CAR includes CAR variants including but not limited split CARs, ON-switch CARS, bispecific or tandem CARs, inhibitory CARs (iCARs) and induced pluripotent stem (iPS) CAR-T cells. The term “Split CARs” refers to CARs wherein the extracellular portion, the ABD and the cytoplasmic signaling domain of a CAR are present on two separate molecules. CAR variants also include ON-switch CARs which are conditionally activatable CARs, e.g., comprising a split CAR wherein conditional hetero-dimerization of the two portions of the split CAR is pharmacologically controlled. CAR molecules and derivatives thereof (i.e., CAR variants) are described, e.g., in PCT Application Nos. US2014/016527, US 1996/017060, US2013/063083; Fedorov et al. Sci Transi Med (2013); 5(215):215ra172; Glienke et al. Front Pharmacol (2015) 6:21; Kakarla & Gottschalk 52 Cancer J (2014) 20(2):151-5; Riddell et al. Cancer J (2014) 20(2):141-4; Pegram et al. Cancer J (2014) 20(2):127-33; Cheadle et al. Immunol Rev (2014) 257(1):91-106; Barrett et al. Annu Rev Med (2014) 65:333-47; Sadelain et al. Cancer Discov (2013) 3(4):388-98; Cartellieri et al., J Biomed Biotechnol (2010) 956304; the disclosures of which are incorporated herein by reference in their entirety. The term “bispecific or tandem CARs” refers to CARs which include a secondary CAR binding domain that can either amplify or inhibit the activity of a primary CAR The term “inhibitory chimeric antigen receptors” or “iCARs” are used interchangeably herein to refer to a CAR where binding iCARs use the dual antigen targeting to shut down the activation of an active CAR through the engagement of a second suppressive receptor equipped with inhibitory signaling domains of a secondary CAR binding domain results in inhibition of primary CAR activation. Inhibitory CARs (iCARs) are designed to regulate CAR-T cells activity through inhibitory receptors signaling modules activation. This approach combines the activity of two CARS, one of which generates dominant negative signals limiting the responses of CAR-T cells activated by the activating receptor. iCARs can switch off the response of the counteracting activator CAR when bound to a specific antigen expressed only by normal tissues. In this way, iCARs-T cells can distinguish cancer cells from healthy ones, and reversibly block functionalities of transduced T cells in an antigen-selective fashion. CTLA-4 or PD-1 intracellular domains in iCARs trigger inhibitory signals on T lymphocytes, leading to less cytokine production, less efficient target cell lysis, and altered lymphocyte motility. The term “tandem CAR” or “TanCAR” refers to CARs which mediate bispecific activation of T cells through the engagement of two chimeric receptors designed to deliver stimulatory or costimulatory signals in response to an independent engagement of two different tumor associated antigens.

[0484] Typically, the chimeric antigen receptor T-cells (CAR-T cells) are T-cells which have been recombinantly modified by transduction with an expression vector encoding a CAR in substantial accordance with the teaching above.

[0485] In some embodiments, the engineered T cell is allogeneic with respect to the individual that is treated. Graham et al. (2018) Cell 7(10) E155. In some embodiments an allogeneic engineered T cell is fully HLA matched. However not all patients have a fully matched donor and a cellular product suitable for all patients independent of HLA type provides an alternative.

[0486] Because the cell product may consist of a subject's own T-cells, the population of the cells to be administered is to the subject is necessarily variable. Consequently, identifying the optimal concentration of the CAR-T cell will be optimized by the caregiver in accordance with the needs of the subject to be treated and monitored by conventional laboratory testing. Additionally, since the CAR-T cell agent is variable, the response to such agents can vary and thus involves the ongoing monitoring and management of therapy related toxicities which are managed with a course of pharmacologic immunosuppression or B cell depletion prior to the administration of the CAR-T cell treatment. Usually, at least 1×10⁶ cells/kg will be administered, at least 1×10⁷ cells/kg, at least 1×10⁸ cells/kg, at least 1×10⁹ cells/kg, at least 1×10¹⁰ cells/kg, or more, usually being limited by the number of T cells that are obtained during collection. The engineered cells may be infused to the subject in any physiologically acceptable medium by any convenient route of administration, normally intravascularly, although they may also be introduced by other routes, where the cells may find an appropriate site for growth

[0487] If the T cells used in the practice of the present invention are allogeneic T cells, such cells may be modified to reduce graft versus host disease. For example, the engineered cells of the present invention may be TCRαβ receptor knock-outs achieved by gene editing techniques. TCRαβ is a heterodimer and both alpha and beta chains need to be present for it to be expressed. A single gene codes for the alpha chain (TRAC), whereas there are 2 genes coding for the beta chain, therefore TRAC loci KO has been deleted for this purpose. A number of different approaches have been used to accomplish this deletion, e.g. CRISPR/Cas9; meganuclease; engineered I-Crel homing endonuclease, etc. See, for example, Eyquem et al. (2017) Nature 543:113-117, in which the TRAC coding sequence is replaced by a CAR coding sequence; and Georgiadis et al. (2018) Mol. Ther. 26:1215-1227, which linked CAR expression with TRAC disruption by clustered regularly interspaced short palindromic repeats (CRISPR)/Cas9 without directly incorporating the CAR into the TRAC loci. An alternative strategy to prevent GVHD modifies T cells to express an inhibitor of TCRαβ signaling, for example using a truncated form of CD3ζ as a TCR inhibitory molecule.

### Chemokine and Cytokine Agents as Supplementary Agents:

[0488] In some embodiments the binding protein is administered in combination with additional cytokines including but not limited to IL2, IL7, IL12, IL15 (See U.S. Pat. No. 10,398,761 issued Sep. 13, 2019) and IL18 including analogs and variants of each thereof.

### Activation-induced Cell Death Inhibitors

[0489] In some embodiments the binding protein is administered in combination with one or more supplementary agents that inhibit Activation-Induced Cell Death (AICD). AICD is a form of programmed cell death resulting from the interaction of Fas receptors (e.g., Fas, CD95) with Fas ligands (e.g., FasL, CD95 ligand), helps to maintain peripheral immune tolerance. The AICD effector cell expresses FasL, and apoptosis is induced in the cell expressing the Fas receptor. Activation-induced cell death is a negative regulator of activated T lymphocytes resulting from repeated stimulation of their T-cell receptors. Examples of agents that inhibit AICD that may be used in combination with the binding proteins described herein include but are not limited to cyclosporin A (Shih, et al., (1989) Nature 339:625-626, IL16 and analogs (including rhIL16, Idziorek, et al., (1998) Clinical and Experimental Immunology 112:84-91), TGFb 1 (Genesteir, et al., (1999) J Exp Med 189(2): 231-239), and vitamin E (Li-Weber, et al., (2002) J Clin Investigation 110(5):681-690).

### Physical Methods

[0490] In some embodiments, the supplementary agent is an anti-neoplastic physical methods including but not limited to radiotherapy, cryotherapy, hyperthermic therapy, surgery, laser ablation, and proton therapy.

### Immune Diseases

[0491] The present disclosure further provides methods of treating a subject suffering from a disease disorder or condition by the administration of a therapeutically effective amount of an IL2R binding protein (or nucleic acid encoding an IL2R binding protein including recombinant viruses encoding the IL2R binding protein) of the present disclosure. Disorders amenable to treatment with IL2R binding proteins (including pharmaceutically acceptable formulations comprising IL2R binding proteins and/or the nucleic acid molecules that encode them including recombinant viruses encoding such IL2R binding proteins) of the present disclosure include inflammatory or autoimmune diseases including but not limited to, viral infections (e.g., AIDS, influenza, chronic HCV, chronic viral hepatitis B, C or D), heliobacter pylori infection, HTLV, organ rejection, graft versus host disease, autoimmune thyroid disease, multiple sclerosis, allergy, asthma, neurodegenerative diseases including Alzheimer's disease, systemic lupus erythramatosis (SLE), autoinflammatory diseases, inflammatory bowel disease (IBD), Crohn's disease, diabetes including Type 1 or type 2 diabetes, inflammation, autoimmune disease, atopic diseases, paraneoplastic autoimmune diseases, cartilage inflammation, arthritis, rheumatoid arthritis, juvenile arthritis, juvenile rheumatoid arthritis, juvenile rheumatoid arthritis, polyarticular juvenile rheumatoid arthritis, systemic onset juvenile rheumatoid arthritis, juvenile ankylosing spondylitis, juvenile enteropathic arthritis, juvenile reactive arthritis, juvenile Reitees Syndrome, SEA Syndrome (Seronegativity Enthesopathy Arthropathy Syndrome), juvenile dermatomyositis, juvenile psoriatic arthritis, juvenile scleroderma, juvenile systemic lupus erythematosus, juvenile vasculitis, pauciarticular rheumatoidarthritis, polyarticular rheumatoidarthritis, systemic onset rheumatoidarthritis, ankylosing spondylitis, enteropathic arthritis, reactive arthritis, Reitees syndrome, SEA Syndrome(Seronegativity, Enthesopathy, Arthropathy Syndrome).

[0492] Other examples of proliferative and/or differentiative disorders amenable to treatment with IL2R binding proteins (including pharmaceutically acceptable formulations comprising IL2R binding proteins and/or the nucleic acid molecules that encode them including recombinant viruses encoding such IL2R binding proteins) of the present disclosure include, but are not limited to, skin disorders. The skin disorder may involve the aberrant activity of a cell or a group of cells or layers in the dermal, epidermal, or hypodermal layer, or an abnormality in the dermal-epidermal junction. For example, the skin disorder may involve aberrant activity of keratinocytes (e.g., hyperproliferative basal and immediately suprabasal keratinocytes), melanocytes, Langerhans cells, Merkel cells, immune cell, and other cells found in one or more of the epidermal layers, e.g., the stratum basale (stratum gemvnativum), stratum spinosum, stratum granulosum, stratum lucidum or stratum comeum. In other embodiments, the disorder may involve aberrant activity of a dermal cell, for example, a dermal endothelial, fibroblast, immune cell (e.g., mast cell or macrophage) found in a dermal layer, for example, the papillary layer or the reticular layer.

[0493] Examples of skin disorders include psoriasis, psoriatic arthritis, dermatitis (eczema), for example, exfoliative dermatitis or atopic dermatitis, pityriasis rubra pilaris, pityriasis rosacea, parapsoriasis, pityriasis lichenoiders, lichen planus, lichen nitidus, ichthyosiform dermatosis, keratodermas, dermatosis, alopecia areata, pyoderma gangrenosum, vitiligo, pemphigoid (e.g., ocular cicatricial pemphigoid or bullous pemphigoid), urticaria, prokeratosis, rheumatoid arthritis that involves hyperproliferation and inflammation of epithelial-related cells lining the joint capsule; dermatitises such as seborrheic dermatitis and solar dermatitis; keratoses such as seborrheic keratosis, senile keratosis, actinic keratosis, photo-induced keratosis, and keratosis follicularis; acne vulgaris; keloids and prophylaxis against keloid formation; nevi; warts including verruca, condyloma or condyloma acuminatum, and human papilloma viral (HPV) infections such as venereal warts; leukoplakia; lichen planus; and keratitis. The skin disorder can be dermatitis, e.g., atopic dermatitis or allergic dermatitis, or psoriasis.

[0494] The compositions of the present disclosure (including pharmaceutically acceptable formulations comprising IL2R binding proteins and/or the nucleic acid molecules that encode them including recombinant viruses encoding such IL2R binding proteins) can also be administered to a patient who is suffering from (or may suffer from) psoriasis or psoriatic disorders. The term “psoriasis” is intended to have its medical meaning, namely, a disease which afflicts primarily the skin and produces raised, thickened, scaling, nonscarring lesions. The lesions are usually sharply demarcated erythematous papules covered with overlapping shiny scales. The scales are typically silvery or slightly opalescent. Involvement of the nails frequently occurs resulting in pitting, separation of the nail, thickening and discoloration. Psoriasis is sometimes associated with arthritis, and it may be crippling. Hyperproliferation of keratinocytes is a key feature of psoriatic epidermal hyperplasia along with epidermal inflammation and reduced differentiation of keratinocytes. Multiple mechanisms have been invoked to explain the keratinocyte hyperproliferation that characterizes psoriasis. Disordered cellular immunity has also been implicated in the pathogenesis of psoriasis. Examples of psoriatic disorders include chronic stationary psoriasis, plaque psoriasis, moderate to severe plaque psoriasis, psoriasis vulgaris, eruptive psoriasis, psoriatic erythroderma, generalized pustular psoriasis, annular pustular psoriasis, or localized pustular psoriasis.

Combination Of IL2R Binding Proteins with Additional Therapeutic Agents for Autoimmune Disease:

[0495] The present disclosure provides the for the use of the IL2R binding proteins of the present disclosure in combination with one or more additional active agents (“supplementary agents”) in the treatment of autoimmune disease. As used herein, the term “supplementary agents” includes agents that can be administered or introduced separately, for example, formulated separately for separate administration (e.g., as may be provided in a kit) and/or therapies that can be administered or introduced in combination with the IL2R binding proteins.

[0496] As used herein, the term “in combination with” when used in reference to the administration of multiple agents to a subject refers to the administration of a first agent at least one additional (i.e., second, third, fourth, fifth, etc.) agent to a subject. For purposes of the present invention, one agent (e.g., IL2R binding protein) is considered to be administered in combination with a second agent (e.g. a therapeutic autoimmune antibody such as Humira®) if the biological effect resulting from the administration of the first agent persists in the subject at the time of administration of the second agent such that the therapeutic effects of the first agent and second agent overlap. For example, the therapeutic antibodies are sometimes administered by IV infusion every two weeks (e.g. adalimumab in the treatment of Crohn's disease) while the IL2R binding proteins of the present disclosure may be administered more frequently, e.g. daily, BID, or weekly. However, the administration of the first agent (e.g. entaercept) provides a therapeutic effect over an extended time and the administration of the second agent (e.g. an IL2R binding protein) provides its therapeutic effect while the therapeutic effect of the first agent remains ongoing such that the second agent is considered to be administered in combination with the first agent, even though the first agent may have been administered at a point in time significantly distant (e.g. days or weeks) from the time of administration of the second agent. In one embodiment, one agent is considered to be administered in combination with a second agent if the first and second agents are administered simultaneously (within 30 minutes of each other), contemporaneously or sequentially. In some embodiments, a first agent is deemed to be administered “contemporaneously” with a second agent if first and second agents are administered within about 24 hours of each another, preferably within about 12 hours of each other, preferably within about 6 hours of each other, preferably within about 2 hours of each other, or preferably within about 30 minutes of each other. The term “in combination with” shall also understood to apply to the situation where a first agent and a second agent are co-formulated in single pharmaceutically acceptable formulation and the co-formulation is administered to a subject. In certain embodiments, the IL2R binding protein and the supplementary agent(s) are administered or applied sequentially, e.g., where one agent is administered prior to one or more other agents. In other embodiments, the IL2R binding protein and the supplementary agent(s) are administered simultaneously, e.g., where two or more agents are administered at or about the same time; the two or more agents may be present in two or more separate formulations or combined into a single formulation (i.e., a co-formulation). Regardless of whether the agents are administered sequentially or simultaneously, they are considered to be administered in combination for purposes of the present disclosure.

[0497] In some embodiments, the supplementary agent is one or more agents selected from the group consisting of corticosteroids (including but not limited to prednisone, budesonide, prednilisone), Janus kinase inhibitors (including but not limited to tofacitinib (Xeljanz®), calcineurin inhibitors (including but not limited to cyclosporine and tacrolimus), mTor inhibitors (including but not limited to sirolimus and everolimus), IMDH inhibitors (including but not limited to azathioprine, leflunomide and mycophenolate), biologics such as abatcept (Orencia®) or etanercept (Enbrel®), and therapeutic antibodies. Examples of therapeutic antibodies that may be administered as supplementary agents in combination with the IL2R binding proteins of the present disclosure in the treatment of autoimmune disease include but are not limited to anti-CD25 antibodies (e.g. daclizumab and basiliximab), anti-VLA-4 antibodies (e.g. natalizumab), anti-CD52 antibodies (e.g. alemtuzumab), anti-CD20 antibodies (e.g. rituximab, ocrelizumab), anti-TNF antibodies (e.g. infliximab, and adalimumab), anti-IL6R antibodies (e.g. tocilizumab), anti-TNFα antibodies (e.g. adalimumab (Humira®), golimumab, and infliximab), anti-integrin-α4β7 antibodies (e.g. vedolizumab), anti-IL17a antibodies (e.g. brodalumab or secukinumab), anti-IL4Ra antibodies (e.g. dupilumab), anti-RANKL antibodies, IL6R antibodies, anti-IL1β antibodies (e.g. canakinumab), anti-CD h a antibodies (e.g. efalizumab), anti-CD3 antibodies (e.g. muramonab), anti-IL5 antibodies (e.g. mepolizumab, reslizumab), anti-bLyS antibodies (e.g. belimumab); and anti-IL12/IL23 antibodies (e.g ustekinumab).

[0498] Many therapeutic antibodies have been approved for clinical use against autoimmune disease. Examples of antibodies approved by the United States Food and Drug Administration (FDA) for use in the treatment of autoimmune diseases in a subject suffering therefrom that may be administered as supplementary agents in combination with the IL2R binding proteins of the present disclosure (and optionally additional supplementary agents) for the treatment of the indicated autoimmune disease are provided in Table 6.

TABLE 6
FDA Immune Disease Antibodies and Indications.

| Name | Target | Indication |
|---|---|---|
| belimumab | bLyS | Systemic lupus erythematosus |
| efalizumab | CD11a | Psoriasis |
| ocrelizumab | CD20 | Multiple sclerosis |
| rituximab | CD20 | Multiple sclerosis |
| basiliximab | CD25 | Transplantation rejection |
| daclizumab | CD25 | Transplantation rejection |
| muromonab | CD3 | Transplantation rejection |
| alemtuzumab | CD52 | Multiple sclerosis |
| omalizumab | IgE | Asthma |
| ustekinumab | IL12/IL23 | Plaque psoriasis |
| brodalumab | IL17a | Psoriasis, psoriatic arthritis, ankylosing spondylitis |
| secukinumab | IL17a | Psoriasis, psoriatic arthritis, ankylosing spondylitis |
| ixekizumab | IL17a | Psoriasis, psoriatic arthritis, ankylosing spondylitis |
| canakinumab | IL1ß | Cryopyrin-associated periodic syndrome, tumor necrosis factor |
| | | receptor associated periodic syndrome, hyperimmunoglobulin D |
| | | syndrome, mevalonate kinase deficiency, familial Mediterranean |
| | | fever, rheumatoid arthritis |
| dupilumab | IL4Rα | Asthma, dermatitis |
| mepolizumab | IL5 | Asthma |
| reslizumab | IL5 | Asthma |
| tocilizumab | IL6R | Rheumatoid arthritis |
| vedolizumab | Integrin-α4β7 | Ulcerative colitis, Crohn's disease |
| denosumab | RANKL | Osteoporosis |
| certolizumab | TNFa | Chron's disease, rheumatoid arthritis |
| golimumab | TNFa | Rheumatoid arthritis, psoriatic arthritis, ankylosing spondylitis |
| adalimumab | TNFα | Rheumatoid arthritis, juvenile idiopathic arthritis, psoriatic arthritis, |
| | | ankylosing spondylitis, Crohn's disease, plaque psoriasis |
| infliximab | TNFα | Crohn's disease, ulcerative colitis, rheumatoid arthritis, ankylosing |
| | | spondylitis, psoriatic arthritis, plaque psoriasis |
| ranibizumab | VEGF-A | Neovascular age-related macular degeneration, macular edema |
| natalizumab | VLA-4 | Multiple sclerosis, relapsing rultiple sclerosis, Crohn's disease |

[0499] The foregoing antibodies useful as supplementary agents in the practice of the methods of the present disclosure may be administered alone or in the form of any antibody drug conjugate (ADC) comprising the antibody, linker, and one or more drugs (e.g. 1, 2, 3, 4, 5, 6, 7, or 8 drugs) or in modified form (e.g. PEGylated).

[0500] In some embodiments the supplementary agent is a vaccine. The IL2R binding proteins of the present invention may be administered to a subject in combination with vaccines as an adjuvant to enhance the immune response to the vaccine in accordance with the teaching of Doyle, et al U.S. Pat. No. 5,800,819 issued Sep. 1, 1998. Examples of vaccines that may be combined with the IL2R binding proteins of the present invention include are HSV vaccines, Bordetella pertussis, Escherichia coli vaccines, pneumococcal vaccines including multivalent pneumococcal vaccines such as Prevnar® 13, diptheria, tetanus and pertussis vaccines (including combination vaccines such as Pediatrix®) and Pentacel®), varicella vaccines, Haemophilus influenzae type B vaccines, human papilloma virus vaccines such as Garasil®, polio vaccines, Leptospirosis vaccines, combination respiratory vaccine, Moraxella vaccines, and attenuated live or killed virus vaccine products such as bovine respiratory disease vaccine (RSV), multivalent human influenza vaccines such as Fluzone® and Quadravlent Fluzone®), feline leukemia vaccine, transmissible gastroenteritis vaccine, COVID-19 vaccine, and rabies vaccine.

### Selectivity

[0501] In some embodiments, provided herein are methods to selectively induce proliferation of a first cell type over a second cell type, comprising contacting a population of cells comprising both the first and second cell types with an IL2 binding protein described herein, thereby selectively inducing proliferation in one or more of the first cell type over one or more of the second cell type. In some embodiments, the first cell type is T cells and the second cell type is NK cells. In some embodiments, the first cell type is NK cells and the second cell type is T cells. In other embodiments, the number of cells of the first cell type is at least 1.2 (e.g., at least 1.4, 1.6, 1.8, 2, 2.2, 2.4, 2.6, 2.8, 3, 3.2, 3.4, 3.6, 3.8, 4, 6, 8, 10, 12, 14, 16, 18, or 20) fold more than the number of cells of the second cell type.

### Dosage

[0502] Dosage, toxicity and therapeutic efficacy of such binding proteins or nucleic acids compounds can be determined by standard pharmaceutical procedures in cell cultures or experimental animals. The data obtained from the cell culture assays and animal studies can be used in formulating a range of dosage for use in humans. The dosage of such compounds lies preferably within a range of circulating concentrations that include the ED50 with minimal acceptable toxicity. The dosage may vary within this range depending upon the dosage form employed and the route of administration utilized. For any compound used in the method of the invention, the therapeutically effective dose can be estimated initially from cell culture assays. A dose may be formulated in animal models to achieve a circulating plasma concentration range that includes the IC50 as determined in cell culture. Such information can be used to more accurately determine useful doses in humans. Levels in plasma may be measured, for example, by high performance liquid chromatography.

[0503] As defined herein, a therapeutically effective amount of a subject binding protein (i.e., an effective dosage) depends on the polypeptide selected. For instance, single dose amounts in the range of approximately 0.001 to 0.1 mg/kg of patient body weight can be administered; in some embodiments, about 0.005, 0.01, 0.05 mg/kg may be administered.

[0504] In some embodiments, the pharmaceutically acceptable forms of the binding proteins of the present disclosure are administered to a subject in accordance with a “low-dose” treatment protocol as described in Klatzman, et al. U.S. Pat. Nos. 9,669,071 and 10,293,028B2 the entire teachings of which are herein incorporated by reference. Additional low dose protocols are described in Smith, K. A. (1993) Blood 81(6):1414-1423, He, et al., (2016) Nature Medicine 22(9): 991-993

[0505] In some embodiments of the present disclosure provides methods and compositions for the treatment and/or prevention of neoplastic diseases, disorders or conditions in a subject by the administration to the subject a therapeutically effective amount of a binding protein of the present disclosure wherein the serum concentration of is maintained for a majority (i.e., greater than about 50% of the period of time, alternatively greater than about 60%, alternatively greater than about 70%, alternatively greater than about 80%, alternatively greater than about 90%) of a period of time (e.g. at least 24 hours, alternatively at least 48 hours, alternatively at least 72 hours, alternatively at least 96 hours, alternatively at least 120 hours, alternatively at least 144 hours, alternatively at least 7 days, alternatively at least 10 days, alternatively at least 12 days, alternatively at least 14 days, alternatively at least 28 days, alternatively at least 45 days, alternatively at least 60 days, or longer) at a serum concentration at or above the effective concentration of the binding protein sufficient to promote proliferation of CD3-activated primary human T-cells (e.g., at or above EC₁₀^{PRO}, alternatively at or above EC₂₀^{PRO}, alternatively at or above EC₃₀^{PRO}, alternatively at or above EC₄₀^{PRO}, at or above EC₅₀^{PRO}, alternatively at or above EC₆₀^{PRO}) with respect to such binding protein but at a serum concentration at or below of the effective concentration at a serum concentration of such binding protein sufficient to induce activation of T-cells (e.g., at or below EC₁₀₀^{PRO}, alternatively at or below EC₉₀^{PRO}, alternatively at or below EC₈₀^{PRO}, alternatively at or below EC₇₀^{PRO}, at or below EC₆₀^{PRO}, alternatively at or below EC₅₀^{PRO}) with respect to such binding protein.

[0506] In some embodiments of the present disclosure provides methods and compositions for the treatment and/or prevention of neoplastic diseases, disorders or conditions in a subject by the administration to the subject a therapeutically effective amount of a binding protein described herein sufficient to maintain a serum concentration of the binding protein for more than about 50%, alternatively greater than about 60%, alternatively greater than about 70%, alternatively greater than about 80%, alternatively greater than about 90%) of a period of time of at least 24 hours, alternatively at least 96 hours, alternatively at least 120 hours, alternatively at least 144 hours, alternatively at least 7 days, alternatively at least 10 days, alternatively at least 12 days, alternatively at least 14 days, alternatively at least 28 days, alternatively at least 45 days, alternatively at least 60 days, or longer.

[0507] In some embodiments of the present disclosure provides methods and compositions for the treatment and/or prevention of neoplastic diseases, disorders or conditions in a subject by the administration to the subject a therapeutically effective amount of a binding protein sufficient to maintain a serum concentration of the binding protein at or above the effective concentration for more than about 50%, alternatively greater than about 60%, alternatively greater than about 70%, alternatively greater than about 80%, alternatively greater than about 90%) of a period of time of at least 24 hours, alternatively at least 96 hours, alternatively at least 120 hours, alternatively at least 144 hours, alternatively at least 7 days, alternatively at least 10 days, alternatively at least 12 days, alternatively at least 14 days, alternatively at least 28 days, alternatively at least 45 days, alternatively at least 60 days, or longer.

[0508] In accordance with another aspect, there is provided a method for stimulating the immune system of an animal by administering the binding proteins of the present disclosure. The method is useful to treat disease states where the host immune response is deficient. In treating a subject, a therapeutically effective dose of compound (i.e., active ingredient) is administered. A therapeutically effective dose refers to that amount of the active ingredient that produces amelioration of symptoms or a prolongation of survival of a subject. An effective dose will vary with the characteristics of the binding protein to be administered, the physical characteristics of the subject to be treated, the nature of the disease or condition, and the like. A single administration can range from about 50,000 IU/kg to about 1,000,000 IU/kg or more, more typically about 600,000 IU/kg. This may be repeated several times a day (e.g., 2-3 times per day) for several days (e.g., about 3-5 consecutive days) and then may be repeated one or more times following a period of rest (e.g., about 7-14 days). Thus, an effective dose may comprise only a single administration or many administrations over a period of time (e.g., about 20-30 individual administrations of about 600,000 IU/kg each given over about a 10-20 day period).

[0509] The compositions can be administered one from one or more times per day to one or more times per week; including once every other day. The skilled artisan will appreciate that certain factors may influence the dosage and timing required to effectively treat a subject, including but not limited to the severity of the disease or disorder, previous treatments, the general health and/or age of the subject, and other diseases present. Moreover, treatment of a subject with a therapeutically effective amount of the binding proteins can include a single treatment or, can include a series of treatments. In one embodiment, the compositions are administered every 8 hours for five days, followed by a rest period of 2 to 14 days, e.g., 9 days, followed by an additional five days of administration every 8 hours. In another embodiment, the compositions are administered every other day for a period of at least 6 days, optionally at least 10 days, optionally at least 14 days, optionally at least 30 days, optionally at least 60 days.

[0510] The pharmaceutical compositions can be included in a container, pack, or dispenser together with instructions for administration.

[0511] While compounds that exhibit toxic side effects may be used, care should be taken to design a delivery system that targets such compounds to the site of affected tissue in order to minimize potential damage to uninfected cells and, thereby, reduce side effects. Toxicity and therapeutic efficacy of a binding protein can be determined by standard pharmaceutical procedures in cell culture or experimental animals. Cell culture assays and animal studies can be used to determine the LD50 (the dose lethal to 50% of a population) and the ED₅₀ (the dose therapeutically effective in 50% of a population). The dose ratio between toxic and therapeutic effects is the therapeutic index, which can be expressed as the ratio LC₅₀/EC₅₀. Binding proteins that exhibit large therapeutic indices are preferred. The data obtained from these cell culture assays and animal studies can be used in formulating a range of dosages suitable for use in humans. The dosage of such mutants lies preferably within a range of circulating concentrations that include the ED₅₀ with little or no toxicity. The dosage may vary within this range depending upon a variety of factors, e.g., the dosage form employed, the route of administration utilized, the condition of the subject, and the like.

[0512] A therapeutically effective dose can be estimated initially from cell culture assays by determining an EC₅₀. A dose can then be formulated in animal models to achieve a circulating plasma concentration range that includes the EC₅₀ as determined in cell culture. Such information can be used to more accurately determine useful doses in humans. Levels in plasma may be measured, for example, by HPLC. The exact formulation, route of administration and dosage can be chosen by the individual physician in view of the patient's condition.

[0513] The attending physician for patients treated with binding proteins of the present disclosure would know how and when to terminate, interrupt, or adjust administration due to toxicity, organ dysfunction, and the like. Conversely, the attending physician would also know to adjust treatment to higher levels if the clinical response were not adequate (precluding toxicity). The magnitude of an administered dose in the management of the disorder of interest will vary with the severity of the condition to be treated, with the route of administration, and the like. The severity of the condition may, for example, be evaluated, in part, by standard prognostic evaluation methods. Further, the dose and perhaps dose frequency will also vary according to the age, body weight, and response of the individual patient.

### EXAMPLES

### Example 1—V_{H}H Generation

[0514] Camels were acclimated at research facility for at least 7 days before immunization. Antigen was diluted with 1×PBS (antigen total about 1 mg). The quality of the antigen was assessed by SDS-PAGE to ensure purity (e.g., >80%). For the first time, 10 mL CFA (then followed 6 times using IFA) was added into mortar, then 10 mL antigen in 1×PBS was slowly added into the mortar with the pestle grinding. The antigen and CFA/IFA were ground until the component showed milky white color and appeared hard to disperse. Camels were injected with antigen emulsified in CFA subcutaneously at at least six sites on the body, injecting about 2 mL at each site (total of 10 mL per camel). A stronger immune response was generated by injecting more sites and in larger volumes. The immunization was conducted every week (7 days), for 7 times. The needle was inserted into the subcutaneous space for 10 to 15 seconds after each injection to avoid leakage of the emulsion. Alternatively, a light pull on the syringe plunger also prevented leakage. The blood sample was collected three days later after 7th immunization.

[0515] After immunization, the library was constructed. Briefly, RNA was extracted from blood and transcribed to cDNA. The V_{H}H regions were obtained via two-step PCR, which fragment about 400 bp. The PCR outcomes and the vector of pMECS phagemid were digested with Pst I and Not I, subsequently, ligated to pMECS/Nb recombinant. After ligation, the products were transformed into Escherichia coli (E. coli) TG1 cells by electroporation. Then, the transformants were enriched in growth medium and planted on plates. Finally, the library size was estimated by counting the number of colonies.

[0516] Library biopanning was conducted to screen candidates against the antigens after library construction. Phage display technology was applied in this procedure. Positive colonies were identified by PE-ELISA.

### Example 2—Recombinant Production and Purification

[0517] Codon optimized DNA inserts were cloned into modified pcDNA3.4 (Genscript) for small scale expression in HEK293 cells in 24 well plates. The binding molecules were purified in substantial accordance with the following procedure. Using a Hamilton Star automated system, 96×4 mL of supernatants in 4×24-well blocks were re-arrayed into 4×96-well, 1 mL blocks. PhyNexus micropipette tips (Biotage, San Jose CA) holding 80 μL of Ni-Excel IMAC resin (Cytiva) are equilibrated wash buffer. PBS pH 7.4, 30 mM imidazole. PhyNexus tips were dipped and cycled through 14 cycles of 1 mL pipetting across all 4×96-well blocks. PhyNexus tips were washed in 2×1 mL blocks holding wash buffer. PhyNexus tips were eluted in 3×0.36 mL blocks holding elution buffer: PBS pH 7.4, 400 mM imidazole. PhyNexus tips were regenerated in 3×1 mL blocks of 0.5 M sodium hydroxide.

[0518] The purified protein eluates were quantified using a Biacore® T200 as in substantial accordance with the following procedure. 10 μL of the first 96×0.36 mL eluates were transferred to a Biacore® 96-well microplate and diluted to 60 uL in HBS−EP+ buffer (10 mM Hepes pH 7.4, 150 mM NaCl, 1 mM EDTA, 0.05% Tween 20). Each of the 96 samples was injected on a CMS series S chip previously functionalized with anti-histidine capture antibody (Cytiva): injection is performed for 18 seconds at 5 μL/min. Capture levels were recorded 60 seconds after buffer wash. A standard curve of known VHH concentrations (270, 90, 30, 10, 3.3, 1.1 μg/mL) was acquired in each of the 4 Biacore chip flow cells to eliminate cell-to-cell surface variability. The 96 captures were interpolated against the standard curve using a non-linear model including specific and unspecific, one-site binding. Concentrations in the first elution block varied from 12 to 452 μg/mL corresponding to a 4-149 μg. SDS-PAGE analysis of 5 randomly picked samples was performed to ensure molecular weight of eluates corresponded to expected values (˜30 kDa).

[0519] The concentration of the proteins was normalized using the Hamilton Star automated system in substantial accordance with the following procedure. Concentration values are imported in an Excel spreadsheet where pipetting volumes were calculated to perform dilution to 50 μg/mL in 0.22 mL. The spreadsheet was imported in a Hamilton Star method dedicated to performing dilution pipetting using the first elution block and elution buffer as diluent. The final, normalized plate was sterile filtered using 0.22 μm filter plates (Corning).

### Example 3—ELISA Studies for IL2Rb VHH

[0520] The single domain antibodies of the present disclosure were obtained from camels by immunization with an extracellular domain of a IL2Rb receptor. IL2Rb VHH molecules of the present disclosure of the present disclosure were generated in substantial accordance with the teaching of the Examples. Briefly, a camel was sequentially immunized with the ECD of the human IL2Rb and mouse IL2Rb over a period several weeks of by the subcutaneous an adjuvanted composition containing a recombinantly produced fusion proteins comprising the extracellular domain of the IL2Rb, the human IgG1 hinge domain and the human IgG1 heavy chain Fc. Following immunization, RNAs extracted from a blood sample of appropriate size VHH-hinge-CH2-CH3 species were transcribed to generate DNA sequences, digested to identify the approximately 400 bp fragment comprising the nucleic acid sequence encoding the VHH domain was isolated. The isolated sequence was digested with restriction endonucleases to facilitate insertion into a phagemid vector for in frame with a sequence encoding a his-tag and transformed into E. coli to generate a phage library. Multiple rounds of biopanning of the phage library were conducted to identify VHHs that bound to the ECD of IL2Rb (human or mouse as appropriate). Individual phage clones were isolated for periplasmic extract ELISA (PE-ELISA) in a 96-well plate format and selective binding confirmed by colorimetric determination. The IL2Rb binding molecules that demonstrated specific binding to the IL2Rb antigen were isolated and sequenced and sequences analyzed to identify VHH sequences, CDRs and identify unique VHH clonotypes. As used herein, the term “clonotypes” refers a collection of binding molecules that originate from the same B-cell progenitor cell, in particular collection of antigen binding molecules that belong to the same germline family, have the same CDR3 lengths, and have 70% or greater homology in CDR3 sequence. The VHH molecules demonstrating specific binding to the hIL2Rb ECD antigen (anti-human IL2Rb VHHs) and the CDRs isolated from such VHHs are provided in Table 34. The VHH molecules demonstrating specific binding to the mIL2Rb ECD antigen (anti-mouse IL2Rb VHHs) and the CDRs isolated from such VHHs are provided in Table 35. Nucleic acid sequences encoding the VHHs of Table 34 and 35 are provided in Tables 38 and 39, respectively.

[0521] To more fully characterize the binding properties and evaluate binding affinity of the VHH molecules generated in accordance with the foregoing, representative examples of each of the human VHH clonotypes were subjected to analysis by surface plasmon resonance in substantial accordance with the teaching of Example 6 herein. The results of these SPR studies are summarized in Table 16 below.

### Example 4. Evaluation of Binding Affinity Via Surface Plasmon Resonance for IL2Rb VHH

[0522] A representative example from each hIL2Rb VHH clonotype generated as descried above was selected for evaluation of binding via SPR as follows. Evaluation of binding affinity of the hIL2Rb binding molecules shown in Table 16 was conducted using surface plasmon resonance (SPR) in substantial accordance with the following procedure. All experiments were conducted in 10 mM Hepes, 150 mM NaCl, 0.05% (v/v) Polysorbate 20 (PS20) and 3 mM EDTA (HBS−EP+ buffer) on a Biacore T200 instrument equipped with a Protein A derivatized sensor chip (Cytiva). Mono-Fc VHH ligands were flowed at 5 μl/min for variable time ranging from 18 to 300 seconds, reaching the capture loads listed in the tables below. Following ligand capture, injections of a 2-fold dilution series of the extracellular domain of the IL2Rb-receptor modified to incorporate a C-terminal poly-His sequence, typically comprising at least five concentrations between 1 μM and 1 nM, were performed in either high performance or single cycle kinetics mode. Surface regeneration was achieved by flowing 10 mM glycine-HCl, pH 1.5 (60 seconds, 50 μL/min). Buffer-subtracted sensograms were processed with Biacore T200 Evaluation Software and globally fit with a 1:1 Langmuir binding model (bulk shift set to zero) to extract kinetics and affinity constants (kₐ, k_{d}, K_{D}). R_{MAX}<100 RU indicates surface density compatible with kinetics analysis. Calculated Rₘₐₓ values were generated using the equation: Rmax=Load (RU)×valency of ligand×(Molecular weight of analyte/Molecular weight of ligand). Surface activity was defined as the ratio of experimental/calculated Rmax. The results of these binding affinity experiments are provided in Table 16.

TABLE 16
anti-hIL2Rb Mono-Fc VHHs binding to hIL2Rb-his

| | SEQ | k_{ON} | k_{OFF} | Affinity | Rmax | Load | Calc. Rmax | Surface |
|---|---|---|---|---|---|---|---|---|
| Ligand | ID NO | (1/Ms) | (1/s) | (nM) | (RU) | (RU) | (RU) | Activity |
| hIL2Rb VHH1 | 25 | 1.98E+07 | 1.99E−02 | 1 | 17.6 | 62.4 | 48 | 37% |
| hIL2Rb_VHH2 | 26 | 1.39E+05 | 2.24E−03 | 16 | 5.4 | 26.8 | 20 | 26% |
| hIL2Rb_VHH3 | 27 | 1.57E+05 | 6.99E−03 | 47 | 14.7 | 36.8 | 28 | 52% |
| hIL2Rb_VHH4 | 28 | 6.00E+05 | 2.05E−03 | 3.4 | 24.4 | 33.2 | 25 | 96% |
| hIL2Rb_VHH5 | 29 | 3.82E+06 | 1.54E−03 | 0.4 | 32.3 | 100 | 77 | 42% |
| hIL2Rb_VHH6 | 30 | 1.90E+07 | 2.29E−02 | 1.2 | 38.9 | 96.9 | 74 | 53% |
| hIL2Rb_VHH7 | 31 | 2.86E+06 | 3.17E−03 | 1.1 | 32.1 | 98.3 | 75 | 43% |
| hIL2Rb_VHH8 | 32 | ND | ND | ND | ~5 | 279 | 213 | <5% |

### Example 5—ELISA Studies for IL2R2g VHH

[0523] The single domain antibodies of the present disclosure were obtained from camels by immunization with an extracellular domain of a IL2Rg receptor (CD132). IL2Rg V_{H}H molecules of the present disclosure of the present disclosure were generated in substantial accordance with the teaching of the Examples. Briefly, a camel was sequentially immunized with the ECD of the human IL2Rg and mouse IL2Rg over a period several weeks of by the subcutaneous an adjuvanted composition containing a recombinantly produced fusion proteins comprising the extracellular domain of the IL2Rg, the human IgG1 hinge domain and the human IgG1 heavy chain Fc. Following immunization, RNAs extracted from a blood sample of appropriate size VHH-hinge-CH2-CH3 species were transcribed to generate DNA sequences, digested to identify the approximately 400 bp fragment comprising the nucleic acid sequence encoding the VHH domain was isolated. The isolated sequence was digested with restriction endonucleases to facilitate insertion into a phagemid vector for in frame with a sequence encoding a his-tag and transformed into E. coli to generate a phage library. Multiple rounds of biopanning of the phage library were conducted to identify VHHs that bound to the ECD of IL2Rg (human or mouse as appropriate). Individual phage clones were isolated for periplasmic extract ELISA (PE-ELISA) in a 96-well plate format and selective binding confirmed by colorimetric determination. The IL2Rg binding molecules that demonstrated specific binding to the IL2Rg antigen were isolated and sequenced and sequences analyzed to identify VHH sequences, CDRs and identify unique VHH clonotypes. As used herein, the term “clonotypes” refers a collection of binding molecules that originate from the same B-cell progenitor cell, in particular collection of antigen binding molecules that belong to the same germline family, have the same CDR3 lengths, and have 70% or greater homology in CDR3 sequence. The VHH molecules demonstrating specific binding to the hIL2Rg ECD antigen (anti-human IL2Rg VHHs) and the CDRs isolated from such VHHs are provided in Table 36. The VHH molecules demonstrating specific binding to the mIL2Rg ECD antigen (anti-mouse IL2Rg VHHs) and the CDRs isolated from such VHHs are provided in Table 37. Nucleic acid sequences encoding the VHHs of Table 36 and 37 are provided in Tables 40 and 41, respectively.

### Example 6. Evaluation of Binding Affinity Via Surface Plasmon Resonance for IL2Rg VHH

[0524] To more fully characterize the binding properties and evaluate binding affinity of the VHH molecules generated in accordance with the foregoing, representative examples of each of the human VHH clonotypes were subjected to analysis of by surface plasmon resonance in substantial accordance with the teaching of the examples herein. The results of these SPR studies are summarized in Table 17 below.

TABLE 17
anti-hIL2Rg Mono-Fc VHHs binding to hIL2Rg-his
(Antigen: Sino Biological, Catalog# 10555)

| | SEQ | k_{ON} | k_{OFF} | Affinity | Rmax | Load | Calc. Rmax | Surface |
|---|---|---|---|---|---|---|---|---|
| Ligand | ID NO | (1/Ms) | (1/s) | (nM) | (RU) | (RU) | (RU) | Activity |
| hIL-2Rg_VHH8 | 306 | 3.66E+05 | 8.12E−04 | 2.2 | 41.6 | 49.3 | 38 | 110% |
| hIL-2Rg_VHH15 | 313 | 9.68E+04 | 2.51E−03 | 26 | 47.1 | 84 | 64 | 73% |
| hIL-2Rg_VHH19 | 317 | 2.85E+06 | 6.93E−03 | 2.4 | 7 | 28 | 21 | 33% |
| hIL-2Rg_VHH20 | 318 | 1.92E+05 | 2.70E−03 | 14.1 | 227 | 103 | 475.4 | 48% |
| hIL-2Rg_VHH21 | 319 | 6.56E+04 | 1.13E−03 | 17.2 | 14.6 | 57.5 | 245.8 | 6% |
| hIL-2Rg_VHH22 | 320 | 5.54E+05 | 3.54E−03 | 6.4 | 39.6 | 47.8 | 37 | 108% |

[0525] As illustrated by the data presented in Table 17, the hIL2Rg binding molecules generated in accordance with the teaching of present disclosure exhibit specific binding and provided a range of affinities to the extracellular domain of hIL2Rg.

### Example 7 Evaluation of Binding Affinity Via Surface Plasmon Resonance for IL2Rb/IL2R2 VHH Murine Dimer Constructs

[0526] Additional experiments were conducted with murine dimer constructs. All experiments were conducted in 10 mM Hepes, 150 mM NaCl, 0.05% (v/v) Polysorbate 20 (PS20) and 3 mM EDTA (HBS−EP+ buffer) on a Biacore T200 instrument equipped with Protein A or CAP biotin chips (Cytiva). For experiments on Protein A chips, Fc-fused ligands were flowed at 5 μl/min for variable time ranging from 18 to 300 seconds, reaching the capture loads listed in the tables below.

[0527] Following ligand capture, injections of a 2-fold dilution series of analyte typically comprising at least five concentrations between 1 μM and 1 nM were performed in either high performance or single cycle kinetics mode. Surface regeneration was achieved by flowing 10 mM glycine-HCl, pH 1.5 (60 seconds, 50 μL/min). Buffer-subtracted sensograms were processed with Biacore T200 Evaluation Software and globally fit with a 1:1 Langmuir binding model (bulk shift set to zero) to extract kinetics and affinity constants (ka, kd, KD). RMAX<100 RU indicates surface density compatible with kinetics analysis.

[0528] Experiments on CAP chips were performed as described above with an additional capture step of Biotin CAPture reagent (10 seconds, 40 uL/min) performed prior to capture of biotinylated ligands.

[0529] Calculated Rmax were generated using the equation Rmax=Load (RU)×valency of ligand×(Molecular weight of analyte/Molecular weight of ligand. Surface activity was defined as the ratio experimental/calculated Rmax. See tables below for sample information and experimental results.

[0530] Results for Anti-mIL2Rb/mIL2Rg dual VHHs binding to mIL2Rb-Fc were as follows:

| | | k_{ON} | k_{OFF} | Affinity | Rmax | Load | Calc. Rmax | Surface |
|---|---|---|---|---|---|---|---|---|
| Analyte | Ligand | (1/Ms) | (1/s) | (nM) | (RU) | (RU) | (RU) | Activity |
| DR870-his | mIL2Rb-Fc | 4.0E+04 | 1.6E−03 | 39 | 13.9 | 181 | 169 | 8% |
| DR871-his | (SinoBiological | <5.2E+05 | 9.9E−04 | >1.9 | 18.4 | 175 | 164 | 11% |
| DR873-his | cat#50792) | 5.2E+04 | 1.6E−03 | 31 | 16.6 | 172 | 160 | 10% |

[0531] Results for Anti-mIL2Rb/mIL2Rg dual VHHs binding to mIL2Rg-Fc (Sino Biological, catalog #50087) were as follows:

| | | k_{ON} | k_{OFF} | Affinity | Rmax | Load | Calc. Rmax | Surface |
|---|---|---|---|---|---|---|---|---|
| Analyte | Ligand | (1/Ms) | (1/s) | (nM) | (RU) | (RU) | (RU) | Activity |
| DR870-his | mIL2Rg-Fc | 3.2E+06 | 1.6E−03 | 0.49 | 68.5 | 198 | 148 | 46% |
| DR871-his | (SinoBiological | 2.8E+06 | <1E−05 | <0.01 | 87.8 | 200 | 149 | 59% |
| DR873-his | cat#50087) | 6.1E+06 | 4.4E−04 | 0.072 | 80.9 | 195 | 146 | 56% |

### Example 8—Evaluation of STAT5 Activity of Anti-IL2Rβ/γ V_{H}H²s In NKL Cells

[0532] The anti-IL2Rβ/γ V_{H}H²s were evaluated for activity in NKL cells (as described in Robertson, et al (1996) Experimental Hematology 24(3):406-15). NKL is a human IL2 dependent Leukemic cell line with NK cell characteristics that expresses IL2Rβ and IL2Rγ chains and is able to phosphorylate STAT5 and proliferate in response to IL2 receptor signaling.

[0533] NKL cells were contacted with purified anti-IL2Rβ/γ V_{H}H²s to examine induction of STAT5 phosphorylation as follows as follows: Cells were cultured in medium consisting of RPMI 1640 (ThermoFisher), 10 percent fetal bovine serum (ThermoFisher), 1 percent penicillin/streptomycin (ThermoFisher), 1 percent glutamax (ThermoFisher) and 100 pM human IL2 (Synthekine P191029PL 1) at densities between 0.2-1 million cells per ml. Prior to the experiment NKL cells were harvested, centrifuged and washed in DPBS twice. Cells were resuspended at 2 million cells/mL in PBS. anti-IL2Rβ/γ V_{H}H²s were diluted into 96-well plates (Falcon) to 30 nM in 50 μl DPBS and 100 thousand NKL cells were added per well in 50 μl DPBS. Controls included wells without anti-IL2Rβ/γ V_{H}H²s or human IL2 (media) and wells with human IL2 at a final concentration of 100 pM. Plates were transferred to a humidified incubator (ThermoFisher) and incubated at 37 degrees centigrade, 5 percent carbon dioxide for 20 min.

[0534] Plates were removed from the incubator and cells were lysed by adding 100 μl per well of Tris Lysis buffer supplemented with Protease Inhibitor Solution, Phosphatase Inhibitor I and Phosphatase Inhibitor II from MSD Multispot Assay System Phospho-STAT Panel Kit (MSD K15202D) according to manufacturer's instructions. Plates were incubated on ice for 15 minutes and centrifuged at 600×g for 6 minutes. Cell lysates were transferred to a new 96 well plate.

[0535] Induction of STAT5 phosphorylation was measured in the cell lysates using the MSD Multispot Assay System Phospho-STAT Panel (MSD K15202D) according to manufacturer's instructions. Briefly, mAb precoated MSD Phospho-STAT panel assay plates were incubated with 150 μL per well Blocker A in Tris Wash Buffer at 30 mg/mL for 60 min on an orbital shaker (VWR Scientific) at 300 rpm at room temperature. Plates were washed 3 times with Tris Wash Buffer and 30 μL Cell lysates were added per well. Plates were incubated for 60 min on an orbital shaker (VWR Scientific) at 300 rpm at room temperature. Plates were washed 3 times with Tris Wash Buffer and 25 μL 1×detection antibody in 10 mg/mL Blocker A in Tris Wash Buffer was added to each well. Plates were incubated for 60 min on an orbital shaker (VWR Scientific) at 300 rpm at room temperature. Plates were washed 3 times with Tris Wash Buffer and 150 μL 1× Read Buffer T was added to each well and Luminescence signal was read on a Mesoscale Quickplex SQ 120 instrument

[0536] To compare the effect of each anti-IL2Rβ/γ V_{H}H² variant upon STAT5 phosphorylation, MSD luminescence signal values for cells treated with anti-IL2Rβ/γ V_{H}H² were compared to those obtained for control cells treated with growth medium alone to yield a fold induction and with control cells treated with human IL2 to yield a level of activity relative to the response to IL2 as a percentage. The data from these experiments is presented in Table 7.

[0537] In this assay anti-IL2Rβ/γ V_{H}H²s induced STAT5 phosphorylation at distinct levels, but not above levels observed with IL2 at 100 pM.

TABLE 7
pSTAT5 Induction by anti-IL2Rβ/γ V_{H}H² on NKL Cells

| | NKL | Relative | Relative |
|---|---|---|---|
| | pSTAT5 | pSTAT5 | pSTAT5 |
| | Induction | Induction | Induction |
| Anti-IL2Rβ/γ V_{H}H² | (MSD | (fold | (% hIL2 |
| Construct | Signal) | induction) | response) |
| DR632(DR229-DR214) | 595 | 0.5 | 7.9 |
| DR633(DR229-DR217) | 870 | 0.7 | 11.5 |
| DR634(DR229-DR583) | 1189 | 1.0 | 15.7 |
| DR635(DR229-DR584) | 6264 | 5.2 | 82.7 |
| DR636(DR229-DR585) | 912 | 0.8 | 12.0 |
| DR637(DR229-DR586) | 850 | 0.7 | 11.2 |
| DR638(DR229-DR587) | 4495 | 3.8 | 59.4 |
| DR639(DR229-DR587) | 3077 | 2.6 | 40.6 |
| DR640(DR229-DR589) | 1145 | 1.0 | 15.1 |
| DR641(DR229-DR590) | 697 | 0.6 | 9.2 |
| DR642(DR230-DR214) | 3212 | 2.7 | 42.4 |
| DR643(DR230-DR217) | 5300 | 4.4 | 70.0 |
| DR644(DR230-DR583) | 1034 | 0.9 | 13.7 |
| DR645(DR230-DR584) | 2968 | 2.5 | 39.2 |
| DR646(DR230-DR585) | 1095 | 0.9 | 14.5 |
| DR647(DR230-DR586) | 5234 | 4.4 | 69.1 |
| DR648(DR230-DR587) | 3966 | 3.3 | 52.4 |
| DR649(DR230-DR588) | 579 | 0.5 | 7.6 |
| DR650(DR230-DR589) | 861 | 0.7 | 11.4 |
| DR651(DR230-DR590) | 742 | 0.6 | 9.8 |
| DR652(DR231-DR214) | 2626 | 2.2 | 34.7 |
| DR653(DR231-DR217) | 475 | 0.4 | 6.3 |
| DR654(DR231-DR583) | 923 | 0.8 | 12.2 |
| DR655(DR231-DR584) | 968 | 0.8 | 12.8 |
| DR656(DR231-DR585) | 1366 | 1.1 | 18.0 |
| DR657(DR231-DR586) | 1041 | 0.9 | 13.7 |
| DR658(DR231-DR587) | 683 | 0.6 | 9.0 |
| DR659(DR231-DR588) | 1037 | 0.9 | 13.7 |
| DR660(DR231-DR589) | 781 | 0.7 | 10.3 |
| DR661(DR231-DR590) | 888 | 0.7 | 11.7 |
| DR662(DR232-DR214) | 861 | 0.7 | 11.4 |
| DR663(DR232-DR217) | 1055 | 0.9 | 13.9 |
| DR664(DR232-DR583) | 967 | 0.8 | 12.8 |
| DR665(DR232-DR584) | 1105 | 0.9 | 14.6 |
| DR666(DR232-DR585) | 1188 | 1.0 | 15.7 |
| DR667(DR232-DR586) | 1110 | 0.9 | 14.7 |
| DR668(DR232-DR587) | 944 | 0.8 | 12.5 |
| DR669(DR232-DR588) | 931 | 0.8 | 12.3 |
| DR670(DR232-DR589) | 1245 | 1.0 | 16.4 |
| DR671(DR232-DR590) | 1599 | 1.3 | 21.1 |
| DR672(DR233-DR214) | 1587 | 1.3 | 21.0 |
| DR673(DR233-DR217) | 1653 | 1.4 | 21.8 |
| DR674(DR233-DR583) | 3347 | 2.8 | 44.2 |
| DR675(DR233-DR584) | 3561 | 3.0 | 47.0 |
| DR676(DR233-DR584) | 1409 | 1.2 | 18.6 |
| DR677(DR233-DR586) | 845 | 0.7 | 11.2 |
| DR678(DR233-DR587) | 6138 | 5.1 | 81.1 |
| DR679(DR233-DR588) | 1810 | 1.5 | 23.9 |
| DR680(DR233-DR589) | 2073 | 1.7 | 27.4 |
| DR681(DR233-DR590) | 1374 | 1.2 | 18.1 |
| DR682(DR234-DR214) | 1055 | 0.9 | 13.9 |
| DR683(DR234-DR217) | 1006 | 0.8 | 13.3 |
| DR684(DR234-DR583) | 725 | 0.6 | 9.6 |
| DR685(DR234-DR584) | 1070 | 0.9 | 14.1 |
| DR686(DR234-DR585) | 868 | 0.7 | 11.5 |
| DR687(DR234-DR586) | 1173 | 1.0 | 15.5 |
| DR688(DR234-DR587) | 997 | 0.8 | 13.2 |
| DR689(DR234-DR588) | 1227 | 1.0 | 16.2 |
| DR690(DR234-DR589) | 1280 | 1.1 | 16.9 |
| DR691(DR234-DR590) | 917 | 0.8 | 12.1 |
| DR692(DR214-DR229) | 898 | 0.8 | 11.9 |
| DR693(DR214-DR230) | 917 | 0.8 | 12.1 |
| DR694(DR214-DR231) | 984 | 0.8 | 13.0 |
| DR695(DR214-DR232) | 1262 | 1.1 | 16.7 |
| DR696(DR214-DR233) | 1603 | 1.3 | 21.2 |
| DR697(DR214-DR234) | 758 | 0.6 | 10.0 |
| DR698(DR217-DR229) | 1051 | 0.9 | 13.9 |
| DR699(DR217-DR230) | 837 | 0.7 | 11.1 |
| DR700(DR217-DR231) | 881 | 0.7 | 11.6 |
| DR701(DR217-DR232) | 2092 | 1.8 | 27.6 |
| DR702(DR217-DR233) | 1078 | 0.9 | 14.2 |
| DR703(DR217-DR234) | 734 | 0.6 | 9.7 |
| DR704(DR583-DR229) | 722 | 0.6 | 9.5 |
| DR705(DR583-DR230) | 1150 | 1.0 | 15.2 |
| DR706(DR583-DR231) | 752 | 0.6 | 9.9 |
| DR707(DR583-DR232) | 1119 | 0.9 | 14.8 |
| DR708(DR583-DR233) | 772 | 0.6 | 10.2 |
| DR709(DR583-DR234) | 1070 | 0.9 | 14.1 |
| DR710(DR584-DR229) | 812 | 0.7 | 10.7 |
| DR711(DR584-DR230) | 1091 | 0.9 | 14.4 |
| DR712(DR584-DR231) | 992 | 0.8 | 13.1 |
| DR713(DR584-DR232) | 1044 | 0.9 | 13.8 |
| DR714(DR584-DR233) | 923 | 0.8 | 12.2 |
| DR715(DR584-DR234) | 1003 | 0.8 | 13.2 |
| DR716(DR585-DR229) | 2639 | 2.2 | 34.9 |
| DR717(DR585-DR230) | 2103 | 1.8 | 27.8 |
| DR718(DR585-DR231) | 6348 | 5.3 | 83.8 |
| DR719(DR585-DR232) | 1957 | 1.6 | 25.8 |
| DR720(DR585-DR233) | 1999 | 1.7 | 26.4 |
| DR721(DR585-DR234) | 2778 | 2.3 | 36.7 |
| DR722(DR586-DR229) | 4231 | 3.5 | 55.9 |
| DR723(DR586-DR230) | 881 | 0.7 | 11.6 |
| DR724(DR586-DR231) | 5638 | 4.7 | 74.5 |
| DR725(DR586-DR232) | 910 | 0.8 | 12.0 |
| DR726(DR586-DR233) | 1132 | 0.9 | 15.0 |
| DR727(DR586-DR234) | 701 | 0.6 | 9.3 |
| DR728(DR587-DR229) | 859 | 0.7 | 11.3 |
| DR729(DR587-DR230) | 948 | 0.8 | 12.5 |
| DR730(DR587-DR231) | 662 | 0.6 | 8.7 |
| DR731(DR587-DR232) | 1055 | 0.9 | 13.9 |
| DR732(DR587-DR233) | 862 | 0.7 | 11.4 |
| DR733(DR587-DR234) | 771 | 0.6 | 10.2 |
| DR734(DR588-DR229) | 800 | 0.7 | 10.6 |
| DR735(DR588-DR230) | 1090 | 0.9 | 14.4 |
| DR736(DR588-DR231) | 1406 | 1.2 | 18.6 |
| DR737(DR588-DR232) | 932 | 0.8 | 12.3 |
| DR738(DR588-DR233) | 847 | 0.7 | 11.2 |
| DR739(DR588-DR234) | 1020 | 0.9 | 13.5 |
| DR740(DR589-DR229) | 947 | 0.8 | 12.5 |
| DR741(DR589-DR230) | 808 | 0.7 | 10.7 |
| DR742(DR589-DR231) | 1013 | 0.8 | 13.4 |
| DR743(DR589-DR232) | 938 | 0.8 | 12.4 |
| DR744(DR589-DR233) | 807 | 0.7 | 10.7 |
| DR745(DR589-DR234) | 638 | 0.5 | 8.4 |
| DR746(DR590-DR229) | 1304 | 1.1 | 17.2 |
| DR747(DR590-DR230) | 1622 | 1.4 | 21.4 |
| DR748(DR590-DR231) | 890 | 0.7 | 11.8 |
| DR749(DR590-DR232) | 432 | 0.4 | 5.7 |
| DR750(DR590-DR233) | 1041 | 0.9 | 13.7 |
| DR751(DR590-DR234) | 605 | 0.5 | 8.0 |
| medium | 1194 | 1.0 | 15.8 |
| IL2 | 7571 | 6.3 | 100.0 |

### Example 9—Evaluation of Proliferative Activity of Anti-IL2Rβ/γ V_{H}H²s In NKL Cells

[0538] The anti-IL2Rβ/γ V_{H}H²s were evaluated for activity in NKL cells (Robertson, et al (1996) Experimental Hematology 24(3):406-15). NKL is a human IL2 dependent Leukemic cell line with NK cell characteristics that expresses IL2Rβ and IL2Rγ chains and is able to phosphorylate STAT5 and proliferate in response to IL2 receptor signaling.

[0539] NKL cells were contacted with purified anti-IL2Rβ/γ V_{H}H²s as follows: Cells were cultured in medium consisting of RPMI 1640 (ThermoFisher), 10 percent fetal bovine serum (ThermoFisher), 1 percent penicillin/streptomycin (ThermoFisher), 1 percent glutamax (ThermoFisher) and 100 pM human IL2 (Synthekine P191029PL 1) at densities between 0.2-1 million cells per ml. Prior to the experiment NKL cells were harvested, centrifuged, and washed in DPBS twice. NKL cells were resuspended at 1 million cells/mL in growth medium without IL2. Anti-IL2Rβ/γ V_{H}H²s were diluted into 96-well plates (Falcon) at 30 nM in 50 μl growth medium without IL2 and 50 thousand NKL cells in 50 μl DPBS were added per well. Controls included wells without anti-IL2Rβ/γ V_{H}H²s or human IL2 (media) and wells with human IL2 at a final concentration of 100 pM. Plates were transferred to a humidified incubator (ThermoFisher) and incubated at 37 degrees centigrade, 5 percent carbon dioxide for 72 hrs.

[0540] Plates were removed from the incubator and cells were lysed by adding 100 μl per well of Celltiterglo™ (CTG) (Promega) according to manufacturer's instructions. Cell lysates were mixed on an orbital shaker (VWR Scientific) for 10 minutes at 300 rpm. Luminescence was read as counts per second on an Envision 2103 Multilabel Plate Reader (Perkin Elmer) using the ATPLite protocol.

[0541] To compare the effect of each IL-2 VHH dimer upon pSTAT5 induction and NKL cell proliferation, luminescence values from pSTAT and celltiterglo measurements were compared to those obtained for control cells treated with growth medium alone and control cells treated with human IL-2 at 100 pM. IL-2 V_{H}H dimers were identified that induced higher luminescence signals for pSTAT5 induction and cell proliferation than media control but lower than IL-2 at the concentrations used. The data from these experiments is presented in Table 8.

[0542] In this assay 19/120 anti-IL2Rβ/γ V_{H}H²s induced NKL cell proliferation at distinct levels (>1 fold), but not above levels observed with IL2 at 100 pM.

TABLE 8
Induction of Proliferation by Anti-IL2Rβ/γ V_{H}H² on NKL Cells

| | NKL | Relative | Relative |
|---|---|---|---|
| | proliferation | pSTAT5 | pSTAT5 |
| | Induction | Induction | Induction |
| Anti-IL2Rβ/γ V_{H}H² | CTG | (fold | (% hIL2 |
| Construct | (cpm) | induction) | response) |
| DR632(DR229-DR214) | 116506 | 0.8 | 56.6 |
| DR633(DR229-DR217) | 138124 | 0.9 | 67.1 |
| DR634(DR229-DR583) | 136398 | 0.9 | 66.3 |
| DR635(DR229-DR584) | 178418 | 1.2 | 86.7 |
| DR636(DR229-DR585) | 115410 | 0.8 | 56.1 |
| DR637(DR229-DR586) | 122216 | 0.8 | 59.4 |
| DR638(DR229-DR587) | 148994 | 1.0 | 72.4 |
| DR639(DR229-DR587) | 177470 | 1.2 | 86.2 |
| DR640(DR229-DR589) | 137282 | 0.9 | 66.7 |
| DR641(DR229-DR590) | 132522 | 0.9 | 64.4 |
| DR642(DR230-DR214) | 147492 | 1.0 | 71.7 |
| DR643(DR230-DR217) | 177402 | 1.2 | 86.2 |
| DR644(DR230-DR583) | 132806 | 0.9 | 64.5 |
| DR645(DR230-DR584) | 152106 | 1.0 | 73.9 |
| DR646(DR230-DR585) | 124118 | 0.8 | 60.3 |
| DR647(DR230-DR586) | 176110 | 1.2 | 85.6 |
| DR648(DR230-DR587) | 154232 | 1.0 | 74.9 |
| DR649(DR230-DR588) | 135958 | 0.9 | 66.0 |
| DR650(DR230-DR589) | 138590 | 0.9 | 67.3 |
| DR651(DR230-DR590) | 140664 | 1.0 | 68.3 |
| DR652(DR231-DR214) | 168884 | 1.1 | 82.0 |
| DR653(DR231-DR217) | 127516 | 0.9 | 61.9 |
| DR654(DR231-DR583) | 144488 | 1.0 | 70.2 |
| DR655(DR231-DR584) | 126880 | 0.9 | 61.6 |
| DR656(DR231-DR585) | 121026 | 0.8 | 58.8 |
| DR657(DR231-DR586) | 146186 | 1.0 | 71.0 |
| DR658(DR231-DR587) | 105546 | 0.7 | 51.3 |
| DR659(DR231-DR588) | 152634 | 1.0 | 74.1 |
| DR660(DR231-DR589) | 126740 | 0.9 | 61.6 |
| DR661(DR231-DR590) | 136314 | 0.9 | 66.2 |
| DR662(DR232-DR214) | 112768 | 0.8 | 54.8 |
| DR663(DR232-DR217) | 139844 | 0.9 | 67.9 |
| DR664(DR232-DR583) | 119004 | 0.8 | 57.8 |
| DR665(DR232-DR584) | 143704 | 1.0 | 69.8 |
| DR666(DR232-DR585) | 130088 | 0.9 | 63.2 |
| DR667(DR232-DR586) | 136678 | 0.9 | 66.4 |
| DR668(DR232-DR587) | 103200 | 0.7 | 50.1 |
| DR669(DR232-DR588) | 147228 | 1.0 | 71.5 |
| DR670(DR232-DR589) | 122194 | 0.8 | 59.4 |
| DR671(DR232-DR590) | 163078 | 1.1 | 79.2 |
| DR672(DR233-DR214) | 115320 | 0.8 | 56.0 |
| DR673(DR233-DR217) | 150560 | 1.0 | 73.1 |
| DR674(DR233-DR583) | 137342 | 0.9 | 66.7 |
| DR675(DR233-DR584) | 167770 | 1.1 | 81.5 |
| DR676(DR233-DR584) | 169444 | 1.2 | 82.3 |
| DR677(DR233-DR586) | 135714 | 0.9 | 65.9 |
| DR678(DR233-DR587) | 184958 | 1.3 | 89.9 |
| DR679(DR233-DR588) | 156864 | 1.1 | 76.2 |
| DR680(DR233-DR589) | 122214 | 0.8 | 59.4 |
| DR681(DR233-DR590) | 153052 | 1.0 | 74.4 |
| DR682(DR234-DR214) | 110310 | 0.7 | 53.6 |
| DR683(DR234-DR217) | 140478 | 1.0 | 68.2 |
| DR684(DR234-DR583) | 107838 | 0.7 | 52.4 |
| DR685(DR234-DR584) | 139478 | 0.9 | 67.8 |
| DR686(DR234-DR585) | 120032 | 0.8 | 58.3 |
| DR687(DR234-DR586) | 128462 | 0.9 | 62.4 |
| DR688(DR234-DR587) | 136754 | 0.9 | 66.4 |
| DR689(DR234-DR588) | 149798 | 1.0 | 72.8 |
| DR690(DR234-DR589) | 126096 | 0.9 | 61.3 |
| DR691(DR234-DR590) | 139710 | 0.9 | 67.9 |
| DR692(DR214-DR229) | 108572 | 0.7 | 52.7 |
| DR693(DR214-DR230) | 130734 | 0.9 | 63.5 |
| DR694(DR214-DR231) | 113610 | 0.8 | 55.2 |
| DR695(DR214-DR232) | 137054 | 0.9 | 66.6 |
| DR696(DR214-DR233) | 96674 | 0.7 | 47.0 |
| DR697(DR214-DR234) | 132076 | 0.9 | 64.2 |
| DR698(DR217-DR229) | 124264 | 0.8 | 60.4 |
| DR699(DR217-DR230) | 141240 | 1.0 | 68.6 |
| DR700(DR217-DR231) | 174410 | 1.2 | 84.7 |
| DR701(DR217-DR232) | 163990 | 1.1 | 79.7 |
| DR702(DR217-DR233) | 136290 | 0.9 | 66.2 |
| DR703(DR217-DR234) | 140046 | 1.0 | 68.0 |
| DR704(DR583-DR229) | 118478 | 0.8 | 57.6 |
| DR705(DR583-DR230) | 136916 | 0.9 | 66.5 |
| DR706(DR583-DR231) | 113692 | 0.8 | 55.2 |
| DR707(DR583-DR232) | 130934 | 0.9 | 63.6 |
| DR708(DR583-DR233) | 100954 | 0.7 | 49.0 |
| DR709(DR583-DR234) | 138480 | 0.9 | 67.3 |
| DR710(DR584-DR229) | 113468 | 0.8 | 55.1 |
| DR711(DR584-DR230) | 134004 | 0.9 | 65.1 |
| DR712(DR584-DR231) | 133920 | 0.9 | 65.1 |
| DR713(DR584-DR232) | 149190 | 1.0 | 72.5 |
| DR714(DR584-DR233) | 116526 | 0.8 | 56.6 |
| DR715(DR584-DR234) | 136656 | 0.9 | 66.4 |
| DR716(DR585-DR229) | 156810 | 1.1 | 76.2 |
| DR717(DR585-DR230) | 158976 | 1.1 | 77.2 |
| DR718(DR585-DR231) | 167952 | 1.1 | 81.6 |
| DR719(DR585-DR232) | 158644 | 1.1 | 77.1 |
| DR720(DR585-DR233) | 145766 | 1.0 | 70.8 |
| DR721(DR585-DR234) | 168984 | 1.1 | 82.1 |
| DR722(DR586-DR229) | 151054 | 1.0 | 73.4 |
| DR723(DR586-DR230) | 125438 | 0.9 | 60.9 |
| DR724(DR586-DR231) | 180326 | 1.2 | 87.6 |
| DR725(DR586-DR232) | 126750 | 0.9 | 61.6 |
| DR726(DR586-DR233) | 125440 | 0.9 | 60.9 |
| DR727(DR586-DR234) | 127484 | 0.9 | 61.9 |
| DR728(DR587-DR229) | 104160 | 0.7 | 50.6 |
| DR729(DR587-DR230) | 124594 | 0.8 | 60.5 |
| DR730(DR587-DR231) | 102252 | 0.7 | 49.7 |
| DR731(DR587-DR232) | 127720 | 0.9 | 62.0 |
| DR732(DR587-DR233) | 108350 | 0.7 | 52.6 |
| DR733(DR587-DR234) | 133262 | 0.9 | 64.7 |
| DR734(DR588-DR229) | 119826 | 0.8 | 58.2 |
| DR735(DR588-DR230) | 141022 | 1.0 | 68.5 |
| DR736(DR588-DR231) | 145904 | 1.0 | 70.9 |
| DR737(DR588-DR232) | 136648 | 0.9 | 66.4 |
| DR738(DR588-DR233) | 104204 | 0.7 | 50.6 |
| DR739(DR588-DR234) | 137990 | 0.9 | 67.0 |
| DR740(DR589-DR229) | 131632 | 0.9 | 63.9 |
| DR741(DR589-DR230) | 144776 | 1.0 | 70.3 |
| DR742(DR589-DR231) | 135948 | 0.9 | 66.0 |
| DR743(DR589-DR232) | 138268 | 0.9 | 67.2 |
| DR744(DR589-DR233) | 136268 | 0.9 | 66.2 |
| DR745(DR589-DR234) | 132428 | 0.9 | 64.3 |
| DR746(DR590-DR229) | 132472 | 0.9 | 64.4 |
| DR747(DR590-DR230) | 157594 | 1.1 | 76.6 |
| DR748(DR590-DR231) | 132586 | 0.9 | 64.4 |
| DR749(DR590-DR232) | 117108 | 0.8 | 56.9 |
| DR750(DR590-DR233) | 142346 | 1.0 | 69.2 |
| DR751(DR590-DR234) | 114290 | 0.8 | 55.5 |
| medium | 147254 | 1.0 | 71.5 |
| IL2 | 205850 | 1.4 | 100.0 |

### Example 10—Evaluation of Activity of Anti-IL2Rβ/γ V_{H}H²s In Primary NK Cells

[0543] The anti-IL2Rβ/γ V_{H}H²s were evaluated for activity in primary NK cells isolated from human peripheral blood. Primary NK cells express IL2Rβ and IL2Rγ chains and are able to phosphorylate STAT5, proliferate and produce IFN-γ in response to IL2 receptor signaling.

[0544] NK cells were isolated form peripheral blood of healthy donors collected in Leukoreduction System (LRS) Chambers at the Stanford Blood Bank (Palo Alto). Briefly, PBMC were isolated from LRS Chambers using the human Buffy Coat/LRSC PBMC Isolation Kit (Miltenyi). LRS Chambers were harvested in separation buffer (DPBS, 0.5% BSA, 2 mM EDTA) and mixed with sedimentation buffer and Red Blood Cell (RBC) removal antibodies and EDTA at a final concentration of 5 mM in 50 mL Centrifuge tubes. Tubes were centrifuged at 50×g for 3 minutes at room temperature. Supernatant with cells was collected and transferred to a new 50 mL centrifuge tube and separation buffer was added to 50 mL. Tubes were centrifuged at 300×g for 5 minutes at room temperature and supernatant discarded. Cell pellets were resuspended in 4 mL separation buffer and 2 mL Erythrocyte Depletion Microbeads and 1 mL Granulocyte Depletion Microbeads were added. Cells were incubated for 10 minutes at 2-8 degrees centigrade and PBMC were isolated on an AutoMacs Pro instrument (Miltenyi) using protocol ‘Cult 5’. PBMC were counted on a Vi-Cell XR instrument (Beckman).

[0545] NK cells were isolated form PBMC by positive selection using CD56 Microbeads (Miltenyi). Briefly, 1 billion PBMC were incubated with 2 mL CD56 Microbeads and incubated for 15 minutes at 2-8 degrees centigrade. Cells were washed, resuspended in separation buffer and NK cells isolated on an AutoMacs Pro instrument (Miltenyi) using protocol ‘possel’. NK cells were counted on a Vi-Cell XR instrument (Beckman).

[0546] Prior to the experiment NK cells were centrifuged and washed in DPBS twice. Cells were resuspended at 2 million cells/mL in PBS. Anti-IL2Rβ/γ V_{H}H²s were diluted into 96-well plates (Falcon) to 30 nM in 50 μl DPBS and 100 thousand NK cells were added per well in 50 μl DPBS. Controls included wells without anti-IL2Rβ/γ V_{H}H²s or human IL2 (media) and wells with human IL2 at a final concentration of 100 pM. Plates were transferred to a humidified incubator (ThermoFisher) and incubated at 37 degrees centigrade, 5 percent carbon dioxide for 20 min.

[0547] Plates were removed from the incubator and cells were lysed by adding 100 μl per well of Tris Lysis buffer supplemented with Protease Inhibitor Solution, Phosphatase Inhibitor I and Phosphatase Inhibitor II from MSD Multispot Assay System Phospho-STAT Panel Kit (MSD K15202D) according to manufacturer's instructions. Plates were incubated on ice for 15 minutes and centrifuged at 600×g for 6 minutes. Cell lysates were transferred to a new 96 well plate.

[0548] Induction of STAT5 phosphorylation was measured in the cell lysates using the MSD Multispot Assay System Phospho-STAT Panel (MSD K15202D) according to manufacturer's instructions. Briefly, mAb precoated MSD Phospho-STAT panel assay plates were incubated with 150 μL per well Blocker A in Tris Wash Buffer at 30 mg/mL for 60 min on an orbital shaker (VWR Scientific) at 300 rpm at room temperature. Plates were washed 3 times with Tris Wash Buffer and 30 μL Cell lysates were added per well. Plates were incubated for 60 min on an orbital shaker (VWR Scientific) at 300 rpm at room temperature. Plates were washed 3 times with Tris Wash Buffer and 25 μL 1×detection antibody in 10 mg/mL Blocker A in Tris Wash Buffer was added to each well. Plates were incubated for 60 min on an orbital shaker (VWR Scientific) at 300 rpm at room temperature. Plates were washed 3 times with Tris Wash Buffer and 150 μL 1× Read Buffer T was added to each well and Luminescence signal was read on a Mesoscale Quickplex SQ 120 instrument

[0549] To compare the effect of each anti-IL2Rβ/γ V_{H}H²s variant upon STAT5 phosphorylation, MSD luminescence signal values for cells treated with anti-IL2Rβ/γ V_{H}H²s were compared to those obtained for control cells treated with growth medium alone to yield a fold induction and with control cells treated with human IL2 to yield an activity relative to the response to IL2 as a percentage. The data from these experiments is presented in Table 9.

[0550] In this assay 45/120 anti-IL2Rβ/γ V_{H}H²s induced STAT5 phosphorylation at distinct levels, but not above levels observed with IL2 at 100 pM.

TABLE 9
pSTAT5 Induction by Anti-IL2Rβ/γ V_{H}H²s on Primary NK Cells

| | | | Relative |
|---|---|---|---|
| | | Relative | pSTAT5 |
| | NK pSTAT5 | pSTAT5 | Induction |
| Anti-IL2Rβ/γ V_{H}H² | Induction | Induction | (% hIL2 |
| Construct | (MSD Signal) | (fold induction) | response) |
| DR632(DR229-DR214) | 574 | 0.8 | 1.1 |
| DR633(DR229-DR217) | 339 | 0.5 | 0.7 |
| DR634(DR229-DR583) | 2165 | 3.1 | 4.3 |
| DR635(DR229-DR584) | 15080 | 21.4 | 30.0 |
| DR636(DR229-DR585) | 3220 | 4.6 | 6.4 |
| DR637(DR229-DR586) | 280 | 0.4 | 0.6 |
| DR638(DR229-DR587) | 24366 | 34.6 | 48.5 |
| DR639(DR229-DR587) | 3561 | 5.1 | 7.1 |
| DR640(DR229-DR589) | 1756 | 2.5 | 3.5 |
| DR641(DR229-DR590) | 195 | 0.3 | 0.4 |
| DR642(DR230-DR214) | 13823 | 19.6 | 27.5 |
| DR643(DR230-DR217) | 24065 | 34.1 | 47.9 |
| DR644(DR230-DR583) | 556 | 0.8 | 1.1 |
| DR645(DR230-DR584) | 7741 | 11.0 | 15.4 |
| DR646(DR230-DR585) | 1789 | 2.5 | 3.6 |
| DR647(DR230-DR586) | 21564 | 30.6 | 42.9 |
| DR648(DR230-DR587) | 13437 | 19.1 | 26.7 |
| DR649(DR230-DR588) | 236 | 0.3 | 0.5 |
| DR650(DR230-DR589) | 349 | 0.5 | 0.7 |
| DR651(DR230-DR590) | 338 | 0.5 | 0.7 |
| DR652(DR231-DR214) | 12830 | 18.2 | 25.5 |
| DR653(DR231-DR217) | 223 | 0.3 | 0.4 |
| DR654(DR231-DR583) | 220 | 0.3 | 0.4 |
| DR655(DR231-DR584) | 2826 | 4.0 | 5.6 |
| DR656(DR231-DR585) | 6038 | 8.6 | 12.0 |
| DR657(DR231-DR586) | 213 | 0.3 | 0.4 |
| DR658(DR231-DR587) | 202 | 0.3 | 0.4 |
| DR659(DR231-DR588) | 214 | 0.3 | 0.4 |
| DR660(DR231-DR589) | 204 | 0.3 | 0.4 |
| DR661(DR231-DR590) | 192 | 0.3 | 0.4 |
| DR662(DR232-DR214) | 224 | 0.3 | 0.4 |
| DR663(DR232-DR217) | 546 | 0.8 | 1.1 |
| DR664(DR232-DR583) | 1126 | 1.6 | 2.2 |
| DR665(DR232-DR584) | 221 | 0.3 | 0.4 |
| DR666(DR232-DR585) | 255 | 0.4 | 0.5 |
| DR667(DR232-DR586) | 604 | 0.9 | 1.2 |
| DR668(DR232-DR587) | 277 | 0.4 | 0.6 |
| DR669(DR232-DR588) | 456 | 0.6 | 0.9 |
| DR670(DR232-DR589) | 400 | 0.6 | 0.8 |
| DR671(DR232-DR590) | 1875 | 2.7 | 3.7 |
| DR672(DR233-DR214) | 1358 | 1.9 | 2.7 |
| DR673(DR233-DR217) | 3071 | 4.4 | 6.1 |
| DR674(DR233-DR583) | 5420 | 7.7 | 10.8 |
| DR675(DR233-DR584) | 8803 | 12.5 | 17.5 |
| DR676(DR233-DR584) | 580 | 0.8 | 1.2 |
| DR677(DR233-DR586) | 836 | 1.2 | 1.7 |
| DR678(DR233-DR587) | 16689 | 23.7 | 33.2 |
| DR679(DR233-DR588) | 5952 | 8.4 | 11.8 |
| DR680(DR233-DR589) | 5639 | 8.0 | 11.2 |
| DR681(DR233-DR590) | 1228 | 1.7 | 2.4 |
| DR682(DR234-DR214) | 1175 | 1.7 | 2.3 |
| DR683(DR234-DR217) | 480 | 0.7 | 1.0 |
| DR684(DR234-DR583) | 214 | 0.3 | 0.4 |
| DR685(DR234-DR584) | 881 | 1.2 | 1.8 |
| DR686(DR234-DR585) | 246 | 0.3 | 0.5 |
| DR687(DR234-DR586) | 289 | 0.4 | 0.6 |
| DR688(DR234-DR587) | 2121 | 3.0 | 4.2 |
| DR689(DR234-DR588) | 3040 | 4.3 | 6.0 |
| DR690(DR234-DR589) | 1389 | 2.0 | 2.8 |
| DR691(DR234-DR590) | 262 | 0.4 | 0.5 |
| DR692(DR214-DR229) | 586 | 0.8 | 1.2 |
| DR693(DR214-DR230) | 336 | 0.5 | 0.7 |
| DR694(DR214-DR231) | 214 | 0.3 | 0.4 |
| DR695(DR214-DR232) | 467 | 0.7 | 0.9 |
| DR696(DR214-DR233) | 356 | 0.5 | 0.7 |
| DR697(DR214-DR234) | 515 | 0.7 | 1.0 |
| DR698(DR217-DR229) | 242 | 0.3 | 0.5 |
| DR699(DR217-DR230) | 307 | 0.4 | 0.6 |
| DR700(DR217-DR231) | 802 | 1.1 | 1.6 |
| DR701(DR217-DR232) | 10020 | 14.2 | 19.9 |
| DR702(DR217-DR233) | 905 | 1.3 | 1.8 |
| DR703(DR217-DR234) | 419 | 0.6 | 0.8 |
| DR704(DR583-DR229) | 242 | 0.3 | 0.5 |
| DR705(DR583-DR230) | 203 | 0.3 | 0.4 |
| DR706(DR583-DR231) | 211 | 0.3 | 0.4 |
| DR707(DR583-DR232) | 193 | 0.3 | 0.4 |
| DR708(DR583-DR233) | 212 | 0.3 | 0.4 |
| DR709(DR583-DR234) | 203 | 0.3 | 0.4 |
| DR710(DR584-DR229) | 195 | 0.3 | 0.4 |
| DR711(DR584-DR230) | 182 | 0.3 | 0.4 |
| DR712(DR584-DR231) | 206 | 0.3 | 0.4 |
| DR713(DR584-DR232) | 201 | 0.3 | 0.4 |
| DR714(DR584-DR233) | 203 | 0.3 | 0.4 |
| DR715(DR584-DR234) | 192 | 0.3 | 0.4 |
| DR716(DR585-DR229) | 3207 | 4.5 | 6.4 |
| DR717(DR585-DR230) | 2034 | 2.9 | 4.0 |
| DR718(DR585-DR231) | 12281 | 17.4 | 24.4 |
| DR719(DR585-DR232) | 5818 | 8.3 | 11.6 |
| DR720(DR585-DR233) | 2254 | 3.2 | 4.5 |
| DR721(DR585-DR234) | 10913 | 15.5 | 21.7 |
| DR722(DR586-DR229) | 7654 | 10.9 | 15.2 |
| DR723(DR586-DR230) | 293 | 0.4 | 0.6 |
| DR724(DR586-DR231) | 10577 | 15.0 | 21.0 |
| DR725(DR586-DR232) | 442 | 0.6 | 0.9 |
| DR726(DR586-DR233) | 184 | 0.3 | 0.4 |
| DR727(DR586-DR234) | 195 | 0.3 | 0.4 |
| DR728(DR587-DR229) | 205 | 0.3 | 0.4 |
| DR729(DR587-DR230) | 221 | 0.3 | 0.4 |
| DR730(DR587-DR231) | 210 | 0.3 | 0.4 |
| DR731(DR587-DR232) | 217 | 0.3 | 0.4 |
| DR732(DR587-DR233) | 233 | 0.3 | 0.5 |
| DR733(DR587-DR234) | 221 | 0.3 | 0.4 |
| DR734(DR588-DR229) | 594 | 0.8 | 1.2 |
| DR735(DR588-DR230) | 528 | 0.7 | 1.1 |
| DR736(DR588-DR231) | 1909 | 2.7 | 3.8 |
| DR737(DR588-DR232) | 360 | 0.5 | 0.7 |
| DR738(DR588-DR233) | 266 | 0.4 | 0.5 |
| DR739(DR588-DR234) | 580 | 0.8 | 1.2 |
| DR740(DR589-DR229) | 312 | 0.4 | 0.6 |
| DR741(DR589-DR230) | 647 | 0.9 | 1.3 |
| DR742(DR589-DR231) | 330 | 0.5 | 0.7 |
| DR743(DR589-DR232) | 318 | 0.5 | 0.6 |
| DR744(DR589-DR233) | 801 | 1.1 | 1.6 |
| DR745(DR589-DR234) | 206 | 0.3 | 0.4 |
| DR746(DR590-DR229) | 375 | 0.5 | 0.7 |
| DR747(DR590-DR230) | 809 | 1.1 | 1.6 |
| DR748(DR590-DR231) | 474 | 0.7 | 0.9 |
| DR749(DR590-DR232) | 231 | 0.3 | 0.5 |
| DR750(DR590-DR233) | 275 | 0.4 | 0.5 |
| DR751(DR590-DR234) | 189 | 0.3 | 0.4 |
| medium | 705 | 1.0 | 1.4 |
| IL2 | 50261 | 71.3 | 100.0 |

[0551] In addition, EC50 values for pSTAT5 phosphorylation were determined for 36 Anti-IL2Rβ/γ V_{H}H²s. Purified NK cells from 4 different donors were resuspended at 2 million cells/mL in PBS. Anti-IL2Rβ/γ V_{H}H²'s or human IL-2 were titrated into 96-well plates (Falcon) starting at 200 nM in 50 μl DPBS and 6 times 10-fold diluted. 100 thousand NK cells were added per well in 50 μl DPBS. Controls included wells without anti-IL2Rβ/γ V_{H}H²'s or human IL-2 (media). Plates were transferred to a humidified incubator (ThermoFisher) and incubated at 37 degrees centigrade, 5 percent carbon dioxide for 20 min. and pSTAT5 phosphorylation measured as above.

[0552] To determine the EC50 of each anti-IL2Rβ/γ V_{H}H²'s variant upon STAT5 phosphorylation, MSD luminescence signal values for cells treated with anti-IL2Rβ/γ V_{H}H²'s and human IL-2 were analyzed by 4 parameter Nonlinear Regression on log transformed concentration values using Prism GraphPad software. Emax values were compared to those obtained for control cells treated with growth medium alone to yield a fold induction. The data from these experiments is presented in Table 10 and Table 11.

[0553] In this assay anti-IL2Rβ/γ V_{H}H²'s induced STAT5 phosphorylation on human NK cells at distinct EC50 values and Emax values, and relative potency was conserved between donors.

TABLE 10
pSTAT5 Induction by anti-IL2Rβ/γ VHH2 on Primary NK Cells

| anti-IL2Rβ/γ V_{H}H² | EC50 pSTAT5 Induction (pM) | | | |
|---|---|---|---|---|
| Construct | Donor 55 | Donor 56 | Donor 96 | Donor 97 |
| DR634(DR229-DR583) | 490 | 1017 | 13 | 106 |
| DR635(DR229-DR584) | 1164 | 1180 | 295 | 129 |
| DR636(DR229-DR585) | 11876 | 37143 | 4522 | 4555 |
| DR638(DR229-DR587) | 153 | 132 | 16 | 54 |
| DR639(DR229-DR588) | 985 | 1212 | 1463 | 988 |
| DR642(DR230-DR214) | 3191 | 3155 | 1029 | 1038 |
| DR643(DR230-DR217) | 11845 | 11941 | 4648 | 26864 |
| DR644(DR230-DR583) | 665 | 271 | 73 | NA |
| DR645(DR230-DR584) | 1144 | 1108 | 240 | 515 |
| DR648(DR230-DR587) | 982 | 918 | 60 | 111 |
| DR652(DR231-DR214) | 1284 | 1289 | 959 | 1079 |
| DR655(DR231-DR584) | NA | NA | 267 | NA |
| DR656(DR231-DR585) | 707 | 8484 | 2774 | 17693 |
| DR671(DR232-DR590) | NA | NA | 353 | 920 |
| DR674(DR233-DR583) | 1077 | 1027 | 171 | 217 |
| DR675(DR233-DR584) | 4703 | 1308 | 993 | 1571 |
| DR676(DR233-DR584) | NA | NA | 25553 | 256142 |
| DR678(DR233-DR587) | 431 | 279 | 13 | 114 |
| DR679(DR233-DR588) | 5356 | 1148 | 741 | 3234 |
| DR680(DR233-DR589) | 344541 | 12102 | 14276 | 29176 |
| DR681(DR233-DR590) | NA | NA | 527 | NA |
| DR682(DR234-DR214) | 17325 | 2809 | 1488 | 1462 |
| DR688(DR234-DR587) | 351 | 278 | 127 | 113 |
| DR696(DR214-DR233) | NA | NA | 11489 | 112347 |
| DR714(DR584-DR233) | NA | NA | NA | 14998 |
| DR716(DR585-DR229) | 1163 | 1105 | 428 | 252 |
| DR717(DR585-DR230) | 1209 | 1125 | 359 | 314 |
| DR718(DR585-DR231) | 1088 | 1076 | 245 | 256 |
| DR719(DR585-DR232) | 5063 | 2745 | 956 | 1145 |
| DR720(DR585-DR233) | 9199 | 9884 | 14260 | 21597 |
| DR721(DR585-DR234) | 1206 | 1692 | 177 | 188 |
| DR736(DR588-DR231) | 1382 | 1133 | 211 | 256 |
| DR740(DR589-DR229) | NA | NA | NA | NA |
| DR741(DR589-DR230) | NA | NA | NA | 21577 |
| DR744(DR589-DR233) | NA | NA | NA | NA |
| DR747(DR590-DR230) | 7368 | 759 | 177 | 238 |
| IL-2 | 3685 | 9861 | 2480 | 6282 |

NA: Not Available.

TABLE 11
pSTAT5 Induction by anti-IL2Rβ/γ VHH2 on Primary NK Cells

| | Relative pSTAT5 Induction at Emax | | | |
|---|---|---|---|---|
| anti-IL2Rβ/γ V_{H}H² | (fold over medium control) | | | |
| Construct | Donor 55 | Donor 56 | Donor 96 | Donor 97 |
| DR634(DR229-DR583) | 3.1 | 3.1 | 3.8 | 7.9 |
| DR635(DR229-DR584) | 7.0 | 9.1 | 11.2 | 14.3 |
| DR636(DR229-DR585) | 1.9 | 1.4 | 1.6 | 1.7 |
| DR638(DR229-DR587) | 16.4 | 19.7 | 17.4 | 25.3 |
| DR639(DR229-DR588) | 6.9 | 9.0 | 14.9 | 16.4 |
| DR642(DR230-DR214) | 13.8 | 15.2 | 18.6 | 19.5 |
| DR643(DR230-DR217) | 4.8 | 6.1 | 6.6 | 12.8 |
| DR644(DR230-DR583) | 2.2 | 1.5 | 2.0 | 2.9 |
| DR645(DR230-DR584) | 8.2 | 10.1 | 11.9 | 17.2 |
| DR648(DR230-DR587) | 14.6 | 17.6 | 14.5 | 21.8 |
| DR652(DR231-DR214) | 11.5 | 14.0 | 16.6 | 23.7 |
| DR655(DR231-DR584) | 1.4 | 1.1 | 1.3 | 1.2 |
| DR656(DR231-DR585) | 5.9 | 7.0 | 10.7 | 18.2 |
| DR671(DR232-DR590) | 1.4 | 1.6 | 1.6 | 1.3 |
| DR674(DR233-DR583) | 2.6 | 1.9 | 4.8 | 3.9 |
| DR675(DR233-DR584) | 5.3 | 5.0 | 9.5 | 7.6 |
| DR676(DR233-DR584) | 1.9 | 1.7 | 5.1 | 4.7 |
| DR678(DR233-DR587) | 10.1 | 12.9 | 16.1 | 14.0 |
| DR679(DR233-DR588) | 5.7 | 5.3 | 10.4 | 7.9 |
| DR680(DR233-DR589) | 3.1 | 3.2 | 7.2 | 3.9 |
| DR681(DR233-DR590) | 1.0 | 1.0 | 0.8 | 0.6 |
| DR682(DR234-DR214) | 2.1 | 1.4 | 2.1 | 2.1 |
| DR688(DR234-DR587) | 4.7 | 3.1 | 6.6 | 6.8 |
| DR696(DR214-DR233) | 1.7 | 1.3 | 2.5 | 2.0 |
| DR714(DR584-DR233) | 2.0 | 1.6 | 3.8 | 2.7 |
| DR716(DR585-DR229) | 4.5 | 5.0 | 8.9 | 6.2 |
| DR717(DR585-DR230) | 3.1 | 2.7 | 5.9 | 4.0 |
| DR718(DR585-DR231) | 12.7 | 13.4 | 17.8 | 16.1 |
| DR719(DR585-DR232) | 8.7 | 9.3 | 15.1 | 11.4 |
| DR720(DR585-DR233) | 2.1 | 1.8 | 6.3 | 2.6 |
| DR721(DR585-DR234) | 6.9 | 6.1 | 8.8 | 10.6 |
| DR736(DR588-DR231) | 4.8 | 4.7 | 8.8 | 6.5 |
| DR740(DR589-DR229) | 3.0 | 1.0 | 1.5 | 4.7 |
| DR741(DR589-DR230) | 1.2 | 0.9 | 1.5 | 1.3 |
| DR744(DR589-DR233) | 1.6 | 0.8 | 1.5 | 2.1 |
| DR747(DR590-DR230) | 2.7 | 1.9 | 2.9 | 3.3 |
| IL-2 | 22.8 | 31.7 | 31.8 | 38.7 |

NA: Not Available.

### Example 11—Evaluation of Activity of Anti-IL2Rβ/γ V_{H}H2s In Primary NK Cells: Proliferation and IFNγ production

[0554] The anti-IL2Rβ/γ V_{H}H²s were evaluated for activity in primary NK cells isolated from human peripheral blood. Primary NK cells express IL2Rβ and IL2Rγ chains and are able to phosphorylate STAT5, proliferate and produce IFN-γ in response to IL2 receptor signaling.

[0555] PBMC were isolated from human Buffy Coats or Leucocyte Reduction System Chambers (LRSC) using the Custom Sedimentation Kit (Miltenyi, #130-126-357) and Custom Buffy Coat/LRSC PBMC Isolation kits (Miltenyi, 130-126-448) using protocol Cust5 on an autoMACS Pro Separator (Miltenyi) according to manufacturer's instructions. Purified PBMC were counted on a Vi-cell XR (Beckman Coulter) or Vi-cell Blue (Beckman Coulter) cell viability analyzer. NK cells were isolated from human PBMC using CD56 microbeads (Miltenyi, 130-050-401) on an autoMACS Pro Separator (Miltenyi) with protocol possel according to manufacturer's instructions. Purified NK cells were counted on a Vi-cell XR (Beckman Coulter) or Vi-cell Blue (Beckman Coulter) cell viability analyzer. NK cells were contacted with purified VHH dimers to examine induction of STAT5 phosphorylation as follows: Cells were seeded into 96-well plates (Falcon) at 100 thousand cells per well in 95 μl DPBS prewarmed at 37 degrees centigrade. Five μl of each of the 120 purified VHH dimers in DPBS at 300 nM was added to the cells and plates were transferred to a humidified incubator (ThermoFisher) and incubated at 37 degrees centigrade, 5 percent carbon dioxide for 20 minutes.

[0556] NK cells were isolated form peripheral blood of healthy donors collected in Leukoreduction System (LRS) Chambers at the Stanford Blood Bank (Palo Alto). Briefly, PBMC were isolated from LRS Chambers using the human Buffy Coat/LRSC PBMC Isolation Kit (Miltenyi). LRS Chambers were harvested in separation buffer (DPBS, 0.5% BSA, 2 mM EDTA) and mixed with sedimentation buffer and Red Blood Cell (RBC) removal antibodies and EDTA at a final concentration of 5 mM in 50 mL Centrifuge tubes. Tubes were centrifuged at 50×g for 3 minutes at room temperature. Supernatant with cells was collected and transferred to a new 50 mL centrifuge tube and separation buffer was added to 50 mL. Tubes were centrifuged at 300×g for 5 minutes at room temperature and supernatant discarded. Cell pellets were resuspended in 4 mL separation buffer and 2 mL Erythrocyte Depletion Microbeads and 1 mL Granulocyte Depletion Microbeads were added. Cells were incubated for 10 minutes at 2-8 degrees centigrade and PBMC were isolated on an AutoMacs Pro instrument (Miltenyi) using protocol ‘Cust 5’. PBMC were counted on a Vi-Cell XR instrument (Beckman).

[0557] NK cells were isolated form PBMC by positive selection using CD56 Microbeads (Miltenyi). Briefly, 1 billion PBMC were incubated with 2 mL CD56 Microbeads and incubated for 15 minutes at 2-8 degrees centigrade. Cells were washed, resuspended in separation buffer and NK cells isolated on an AutoMacs Pro instrument (Miltenyi) using protocol ‘possel’. Purified NK cells were counted on a Vi-cell XR (Beckman Coulter) or Vi-cell Blue (Beckman Coulter) cell viability analyzer.

[0558] Prior to the experiment NK cells were centrifuged and washed in DPBS twice. Cells were resuspended at 2 million cells/mL in growth medium consisting of Yssel's medium (Iscove's modified Dulbecco's Medium (ThermoFisher), 0.25% w/v percent human albumin (Sigma), 1 percent penicillin/streptomycin (ThermoFisher), 1 percent ITS-X Insulin, Transferrin, Selenium (Gibco), 30 mg/L Tansferrin (Roche), 2 mg/L Palmitic Acid (Sigma), 1 percent LA-OA-Albumin Linoleic Acid, Oleic Acid (Sigma), 1 percent human serum (Gemini) (Yssel et al (1984) J Immunol Methods 72: 219-227). Anti-IL2Rβ/γ V_{H}H²s were diluted into 96-well plates (Falcon) to 30 nM in 75 μl Yssel's medium and 100 thousand NK cells were added per well in 75 μl DPBS. Controls included wells without anti-IL2Rβ/γ V_{H}H²s or human IL2 (media) and wells with human IL2 at a final concentration of 100 pM. Plates were transferred to a humidified incubator (ThermoFisher) and incubated at 37 degrees centigrade, 5 percent carbon dioxide for 5 days.

[0559] In a separate 96 well plate eleven anti-IL2Rβ/γ V_{H}H²s were diluted into 96-well plates (Falcon) to 30 nM in 75 μl Yssel's medium and six 10 fold serial dilutions were made in Yssel's medium. 100 thousand NK cells were added per well in 75 μl DPBS. Controls included wells without anti-IL2Rβ/γ V_{H}H²s or human IL2 (media) and wells with six 10 fold serial dilutions of human IL2 at a starting final concentration of 100 pM. Plates were transferred to a humidified incubator (ThermoFisher) and incubated at 37 degrees centigrade, 5 percent carbon dioxide for 5 days.

[0560] Plates were removed from the incubator and 50 μl of culture supernatant was harvested in to a 96 well flat bottom plate (Costar). Cells were lysed by adding 100 μl per well of Celltiterglo (Promega) according to manufacturer's instructions. Cell lysates were mixed on an orbital shaker (VWR Scientific) for two minutes at 300 rpm then held at room temperature for 10 minutes. Luminescence for NK cell lysates was read as counts per second on an Envision 2103 Multilabel Plate Reader (Perkin Elmer).

[0561] Production of IFNγ in the culture supernatants was measured using the MSD IFNγ V-Plex kit (MSD K151QOD) according to manufacturer's instructions. Briefly, mAb precoated MSD IFNγ assay plates were washed 3 times with 150 μL Tris Wash Buffer and IFNγ standards were diluted in Diluent 2. Culture supernatants were diluted 1:20 with Diluent 2 and 50 μL of samples and standards were added to the IFNγ assay plates and incubated for 120 min on an orbital shaker (VWR Scientific) at 300 rpm at room temperature. Plates were washed 3 times with Tris Wash Buffer and 25 μL 1×detection antibody in Diluent 3 was added to each well. Plates were incubated for 60 min on an orbital shaker (VWR Scientific) at 300 rpm at room temperature. Plates were washed 3 times with Tris Wash Buffer and 150 μL 2×Read Buffer T was added to each well and Luminescence signal was read on a Mesoscale Quickplex SQ 120 instrument. Concentration of IFNγ in the supernatants were calculated based on the standard curve with MSD Discovery Workbench software.

[0562] To compare the effect of each anti-IL2Rβ/γ V_{H}H²s variant upon NK cell proliferation and IFNγ production, Celltiterglo values and IFNγ concentrations for cells treated with anti-IL2Rβ/γ V_{H}H²s were compared to those obtained for control cells treated with growth medium alone to yield a fold induction and with control cells treated with human IL2 to yield an activity relative to the response to IL2 as a percentage. The data from these experiments is presented in Table 12 and Table 13.

[0563] In this assay 111/120 anti-IL2Rβ/γ V_{H}H²s induced NK cell proliferation (>1Fold) at distinct levels, and 22/120 anti-IL2Rβ/γ V_{H}H²s above levels observed with IL2 at 100 pM. In this assay 109/120 anti-IL2Rβ/γ V_{H}H²s induced NK cell IFNγ production (>1Fold) at distinct levels, and 16/120 anti-IL2Rβ/γ V_{H}H²s above levels observed with IL2 at 100 pM. A dose-response titration of 11 anti-IL2Rβ/γ V_{H}H²s showed a concentration dependent induction of proliferation of 4 anti-IL2Rβ/γ V_{H}H²5 (DR230-DR586, DR230-DR217, DR230-DR214, DR230-DR585)) (FIG. 2). Three anti-IL2Rβ/γ V_{H}H²s (DR230-DR589, DR230-DR589, DR231-DR583) failed to induce proliferation of NK cells. Four anti-IL2Rβ/γ V_{H}H²s (DR229-DR584, DR229-DR587, DR229-DR588, DR229-DR583) induced strong proliferation of NK cells that was maintained even at the lowest concentration tested (15 fM).

TABLE 12
Proliferation induced by anti-IL2Rβ/γ V_{H}H² on Primary NK Cells

| | | Relative | Relative |
|---|---|---|---|
| | NK | Proliferation | Proliferation |
| | Proliferation | Induction | Induction |
| Anti-IL2Rβ/γ V_{H}H² | Induction | (fold | (% hIL2 |
| Construct | CTG (cpm) | induction) | response) |
| DR632(DR229-DR214) | 59374 | 1.6 | 44.7 |
| DR633(DR229-DR217) | 84476 | 2.2 | 63.6 |
| DR634(DR229-DR583) | 129450 | 3.4 | 97.5 |
| DR635(DR229-DR584) | 158792 | 4.2 | 119.5 |
| DR636(DR229-DR585) | 66196 | 1.8 | 49.8 |
| DR637(DR229-DR586) | 85292 | 2.3 | 64.2 |
| DR638(DR229-DR587) | 133116 | 3.5 | 100.2 |
| DR639(DR229-DR587) | 140702 | 3.7 | 105.9 |
| DR640(DR229-DR589) | 140980 | 3.7 | 106.1 |
| DR641(DR229-DR590) | 50668 | 1.3 | 38.1 |
| DR642(DR230-DR214) | 132720 | 3.5 | 99.9 |
| DR643(DR230-DR217) | 156030 | 4.1 | 117.5 |
| DR644(DR230-DR583) | 135388 | 3.6 | 101.9 |
| DR645(DR230-DR584) | 150146 | 4.0 | 113.0 |
| DR646(DR230-DR585) | 72526 | 1.9 | 54.6 |
| DR647(DR230-DR586) | 155762 | 4.1 | 117.3 |
| DR648(DR230-DR587) | 144822 | 3.8 | 109.0 |
| DR649(DR230-DR588) | 64048 | 1.7 | 48.2 |
| DR650(DR230-DR589) | 47462 | 1.3 | 35.7 |
| DR651(DR230-DR590) | 49600 | 1.3 | 37.3 |
| DR652(DR231-DR214) | 171010 | 4.5 | 128.7 |
| DR653(DR231-DR217) | 57866 | 1.5 | 43.6 |
| DR654(DR231-DR583) | 49196 | 1.3 | 37.0 |
| DR655(DR231-DR584) | 82024 | 2.2 | 61.8 |
| DR656(DR231-DR585) | 127580 | 3.4 | 96.0 |
| DR657(DR231-DR586) | 57212 | 1.5 | 43.1 |
| DR658(DR231-DR587) | 46432 | 1.2 | 35.0 |
| DR659(DR231-DR588) | 78720 | 2.1 | 59.3 |
| DR660(DR231-DR589) | 50996 | 1.4 | 38.4 |
| DR661(DR231-DR590) | 48910 | 1.3 | 36.8 |
| DR662(DR232-DR214) | 53038 | 1.4 | 39.9 |
| DR663(DR232-DR217) | 118242 | 3.1 | 89.0 |
| DR664(DR232-DR583) | 91608 | 2.4 | 69.0 |
| DR665(DR232-DR584) | 45064 | 1.2 | 33.9 |
| DR666(DR232-DR585) | 49560 | 1.3 | 37.3 |
| DR667(DR232-DR586) | 117570 | 3.1 | 88.5 |
| DR668(DR232-DR587) | 60456 | 1.6 | 45.5 |
| DR669(DR232-DR588) | 59204 | 1.6 | 44.6 |
| DR670(DR232-DR589) | 81900 | 2.2 | 61.7 |
| DR671(DR232-DR590) | 138056 | 3.7 | 103.9 |
| DR672(DR233-DR214) | 120064 | 3.2 | 90.4 |
| DR673(DR233-DR217) | 147252 | 3.9 | 110.9 |
| DR674(DR233-DR583) | 123220 | 3.3 | 92.8 |
| DR675(DR233-DR584) | 146160 | 3.9 | 110.0 |
| DR676(DR233-DR584) | 55708 | 1.5 | 41.9 |
| DR677(DR233-DR586) | 107368 | 2.8 | 80.8 |
| DR678(DR233-DR587) | 160706 | 4.3 | 121.0 |
| DR679(DR233-DR588) | 151432 | 4.0 | 114.0 |
| DR680(DR233-DR589) | 122932 | 3.3 | 92.6 |
| DR681(DR233-DR590) | 83802 | 2.2 | 63.1 |
| DR682(DR234-DR214) | 94996 | 2.5 | 71.5 |
| DR683(DR234-DR217) | 82018 | 2.2 | 61.7 |
| DR684(DR234-DR583) | 46514 | 1.2 | 35.0 |
| DR685(DR234-DR584) | 97470 | 2.6 | 73.4 |
| DR686(DR234-DR585) | 56082 | 1.5 | 42.2 |
| DR687(DR234-DR586) | 63300 | 1.7 | 47.7 |
| DR688(DR234-DR587) | 99810 | 2.6 | 75.1 |
| DR689(DR234-DR588) | 115836 | 3.1 | 87.2 |
| DR690(DR234-DR589) | 108534 | 2.9 | 81.7 |
| DR691(DR234-DR590) | 52358 | 1.4 | 39.4 |
| DR692(DR214-DR229) | 80168 | 2.1 | 60.4 |
| DR693(DR214-DR230) | 44468 | 1.2 | 33.5 |
| DR694(DR214-DR231) | 45548 | 1.2 | 34.3 |
| DR695(DR214-DR232) | 57448 | 1.5 | 43.3 |
| DR696(DR214-DR233) | 62564 | 1.7 | 47.1 |
| DR697(DR214-DR234) | 73146 | 1.9 | 55.1 |
| DR698(DR217-DR229) | 65260 | 1.7 | 49.1 |
| DR699(DR217-DR230) | 68008 | 1.8 | 51.2 |
| DR700(DR217-DR231) | 76818 | 2.0 | 57.8 |
| DR701(DR217-DR232) | 152808 | 4.1 | 115.0 |
| DR702(DR217-DR233) | 77978 | 2.1 | 58.7 |
| DR703(DR217-DR234) | 86778 | 2.3 | 65.3 |
| DR704(DR583-DR229) | 35080 | 0.9 | 26.4 |
| DR705(DR583-DR230) | 46406 | 1.2 | 34.9 |
| DR706(DR583-DR231) | 34682 | 0.9 | 26.1 |
| DR707(DR583-DR232) | 38418 | 1.0 | 28.9 |
| DR708(DR583-DR233) | 40002 | 1.1 | 30.1 |
| DR709(DR583-DR234) | 47088 | 1.2 | 35.5 |
| DR710(DR584-DR229) | 38422 | 1.0 | 28.9 |
| DR711(DR584-DR230) | 36094 | 1.0 | 27.2 |
| DR712(DR584-DR231) | 42562 | 1.1 | 32.0 |
| DR713(DR584-DR232) | 44564 | 1.2 | 33.6 |
| DR714(DR584-DR233) | 31896 | 0.8 | 24.0 |
| DR715(DR584-DR234) | 37140 | 1.0 | 28.0 |
| DR716(DR585-DR229) | 135888 | 3.6 | 102.3 |
| DR717(DR585-DR230) | 125778 | 3.3 | 94.7 |
| DR718(DR585-DR231) | 115728 | 3.1 | 87.1 |
| DR719(DR585-DR232) | 131414 | 3.5 | 98.9 |
| DR720(DR585-DR233) | 136050 | 3.6 | 102.4 |
| DR721(DR585-DR234) | 137718 | 3.7 | 103.7 |
| DR722(DR586-DR229) | 148710 | 3.9 | 112.0 |
| DR723(DR586-DR230) | 74564 | 2.0 | 56.1 |
| DR724(DR586-DR231) | 165338 | 4.4 | 124.5 |
| DR725(DR586-DR232) | 55684 | 1.5 | 41.9 |
| DR726(DR586-DR233) | 36126 | 1.0 | 27.2 |
| DR727(DR586-DR234) | 38650 | 1.0 | 29.1 |
| DR728(DR587-DR229) | 40442 | 1.1 | 30.4 |
| DR729(DR587-DR230) | 42958 | 1.1 | 32.3 |
| DR730(DR587-DR231) | 43068 | 1.1 | 32.4 |
| DR731(DR587-DR232) | 47702 | 1.3 | 35.9 |
| DR732(DR587-DR233) | 42812 | 1.1 | 32.2 |
| DR733(DR587-DR234) | 48304 | 1.3 | 36.4 |
| DR734(DR588-DR229) | 113408 | 3.0 | 85.4 |
| DR735(DR588-DR230) | 119102 | 3.2 | 89.7 |
| DR736(DR588-DR231) | 138570 | 3.7 | 104.3 |
| DR737(DR588-DR232) | 84578 | 2.2 | 63.7 |
| DR738(DR588-DR233) | 48734 | 1.3 | 36.7 |
| DR739(DR588-DR234) | 108850 | 2.9 | 81.9 |
| DR740(DR589-DR229) | 115378 | 3.1 | 86.9 |
| DR741(DR589-DR230) | 113032 | 3.0 | 85.1 |
| DR742(DR589-DR231) | 58200 | 1.5 | 43.8 |
| DR743(DR589-DR232) | 47630 | 1.3 | 35.9 |
| DR744(DR589-DR233) | 96038 | 2.5 | 72.3 |
| DR745(DR589-DR234) | 47518 | 1.3 | 35.8 |
| DR746(DR590-DR229) | 110814 | 2.9 | 83.4 |
| DR747(DR590-DR230) | 124594 | 3.3 | 93.8 |
| DR748(DR590-DR231) | 129464 | 3.4 | 97.5 |
| DR749(DR590-DR232) | 59380 | 1.6 | 44.7 |
| DR750(DR590-DR233) | 62470 | 1.7 | 47.0 |
| DR751(DR590-DR234) | 40034 | 1.1 | 30.1 |
| medium | 37693 | 1.0 | 28.4 |
| IL2 | 132827 | 3.5 | 100.0 |

TABLE 13
IFNγ production by anti-IL2Rβ/γ V_{H}H² on Primary NK Cells

| | | Relative | |
|---|---|---|---|
| | | IFNγ | Relative IFNγ |
| | NK Cell IFNγ | Induction | Induction |
| Anti-IL2Rβ/γ V_{H}H² | Production | (fold | (% hIL2 |
| Construct | (MSD Signal) | induction) | response) |
| DR632(DR229-DR214) | 144618 | 8.7 | 8.1 |
| DR633(DR229-DR217) | 80516 | 4.8 | 4.5 |
| DR634(DR229-DR583) | 1883810 | 113.0 | 105.0 |
| DR635(DR229-DR584) | 1911538 | 114.7 | 106.6 |
| DR636(DR229-DR585) | 36726 | 2.2 | 2.0 |
| DR637(DR229-DR586) | 142020 | 8.5 | 7.9 |
| DR638(DR229-DR587) | 1907171 | 114.4 | 106.3 |
| DR639(DR229-DR587) | 1128817 | 67.7 | 62.9 |
| DR640(DR229-DR589) | 1137944 | 68.3 | 63.4 |
| DR641(DR229-DR590) | 36793 | 2.2 | 2.1 |
| DR642(DR230-DR214) | 1849412 | 110.9 | 103.1 |
| DR643(DR230-DR217) | 1850211 | 111.0 | 103.2 |
| DR644(DR230-DR583) | 795501 | 47.7 | 44.4 |
| DR645(DR230-DR584) | 1960761 | 117.6 | 109.3 |
| DR646(DR230-DR585) | 129630 | 7.8 | 7.2 |
| DR647(DR230-DR586) | 1921088 | 115.2 | 107.1 |
| DR648(DR230-DR587) | 1845712 | 110.7 | 102.9 |
| DR649(DR230-DR588) | 61590 | 3.7 | 3.4 |
| DR650(DR230-DR589) | 23788 | 1.4 | 1.3 |
| DR651(DR230-DR590) | 13376 | 0.8 | 0.7 |
| DR652(DR231-DR214) | 1901886 | 114.1 | 106.0 |
| DR653(DR231-DR217) | 73604 | 4.4 | 4.1 |
| DR654(DR231-DR583) | 38744 | 2.3 | 2.2 |
| DR655(DR231-DR584) | 641257 | 38.5 | 35.8 |
| DR656(DR231-DR585) | 1901425 | 114.0 | 106.0 |
| DR657(DR231-DR586) | 133136 | 8.0 | 7.4 |
| DR658(DR231-DR587) | 83387 | 5.0 | 4.6 |
| DR659(DR231-DR588) | 218983 | 13.1 | 12.2 |
| DR660(DR231-DR589) | 31698 | 1.9 | 1.8 |
| DR661(DR231-DR590) | 12924 | 0.8 | 0.7 |
| DR662(DR232-DR214) | 127725 | 7.7 | 7.1 |
| DR663(DR232-DR217) | 787105 | 47.2 | 43.9 |
| DR664(DR232-DR583) | 431059 | 25.9 | 24.0 |
| DR665(DR232-DR584) | 17316 | 1.0 | 1.0 |
| DR666(DR232-DR585) | 55300 | 3.3 | 3.1 |
| DR667(DR232-DR586) | 658694 | 39.5 | 36.7 |
| DR668(DR232-DR587) | 57260 | 3.4 | 3.2 |
| DR669(DR232-DR588) | 23328 | 1.4 | 1.3 |
| DR670(DR232-DR589) | 215999 | 13.0 | 12.0 |
| DR671(DR232-DR590) | 1279164 | 76.7 | 71.3 |
| DR672(DR233-DR214) | 1690293 | 101.4 | 94.2 |
| DR673(DR233-DR217) | 1195243 | 71.7 | 66.6 |
| DR674(DR233-DR583) | 1520704 | 91.2 | 84.8 |
| DR675(DR233-DR584) | 1922798 | 115.3 | 107.2 |
| DR676(DR233-DR584) | 44387 | 2.7 | 2.5 |
| DR677(DR233-DR586) | 451720 | 27.1 | 25.2 |
| DR678(DR233-DR587) | 1877120 | 112.6 | 104.7 |
| DR679(DR233-DR588) | 1840663 | 110.4 | 102.6 |
| DR680(DR233-DR589) | 1574319 | 94.4 | 87.8 |
| DR681(DR233-DR590) | 79218 | 4.8 | 4.4 |
| DR682(DR234-DR214) | 266392 | 16.0 | 14.9 |
| DR683(DR234-DR217) | 66068 | 4.0 | 3.7 |
| DR684(DR234-DR583) | 9713 | 0.6 | 0.5 |
| DR685(DR234-DR584) | 451812 | 27.1 | 25.2 |
| DR686(DR234-DR585) | 79541 | 4.8 | 4.4 |
| DR687(DR234-DR586) | 122522 | 7.3 | 6.8 |
| DR688(DR234-DR587) | 1299512 | 77.9 | 72.5 |
| DR689(DR234-DR588) | 1546871 | 92.8 | 86.2 |
| DR690(DR234-DR589) | 851698 | 51.1 | 47.5 |
| DR691(DR234-DR590) | 33530 | 2.0 | 1.9 |
| DR692(DR214-DR229) | 341600 | 20.5 | 19.0 |
| DR693(DR214-DR230) | 32214 | 1.9 | 1.8 |
| DR694(DR214-DR231) | 13781 | 0.8 | 0.8 |
| DR695(DR214-DR232) | 50327 | 3.0 | 2.8 |
| DR696(DR214-DR233) | 20592 | 1.2 | 1.1 |
| DR697(DR214-DR234) | 128229 | 7.7 | 7.1 |
| DR698(DR217-DR229) | 373385 | 22.4 | 20.8 |
| DR699(DR217-DR230) | 108166 | 6.5 | 6.0 |
| DR700(DR217-DR231) | 68805 | 4.1 | 3.8 |
| DR701(DR217-DR232) | 1716480 | 103.0 | 95.7 |
| DR702(DR217-DR233) | 114876 | 6.9 | 6.4 |
| DR703(DR217-DR234) | 390416 | 23.4 | 21.8 |
| DR704(DR583-DR229) | 18481 | 1.1 | 1.0 |
| DR705(DR583-DR230) | 26339 | 1.6 | 1.5 |
| DR706(DR583-DR231) | 13676 | 0.8 | 0.8 |
| DR707(DR583-DR232) | 20801 | 1.2 | 1.2 |
| DR708(DR583-DR233) | 28936 | 1.7 | 1.6 |
| DR709(DR583-DR234) | 25068 | 1.5 | 1.4 |
| DR710(DR584-DR229) | 71711 | 4.3 | 4.0 |
| DR711(DR584-DR230) | 16215 | 1.0 | 0.9 |
| DR712(DR584-DR231) | 17139 | 1.0 | 1.0 |
| DR713(DR584-DR232) | 10805 | 0.6 | 0.6 |
| DR714(DR584-DR233) | 17361 | 1.0 | 1.0 |
| DR715(DR584-DR234) | 30424 | 1.8 | 1.7 |
| DR716(DR585-DR229) | 1415371 | 84.9 | 78.9 |
| DR717(DR585-DR230) | 1860610 | 111.6 | 103.7 |
| DR718(DR585-DR231) | 1665366 | 99.9 | 92.9 |
| DR719(DR585-DR232) | 1334193 | 80.0 | 74.4 |
| DR720(DR585-DR233) | 995884 | 59.7 | 55.5 |
| DR721(DR585-DR234) | 1937087 | 116.2 | 108.0 |
| DR722(DR586-DR229) | 1704185 | 102.2 | 95.0 |
| DR723(DR586-DR230) | 119540 | 7.2 | 6.7 |
| DR724(DR586-DR231) | 1928068 | 115.6 | 107.5 |
| DR725(DR586-DR232) | 38001 | 2.3 | 2.1 |
| DR726(DR586-DR233) | 54648 | 3.3 | 3.0 |
| DR727(DR586-DR234) | 15553 | 0.9 | 0.9 |
| DR728(DR587-DR229) | 60701 | 3.6 | 3.4 |
| DR729(DR587-DR230) | 54437 | 3.3 | 3.0 |
| DR730(DR587-DR231) | 30615 | 1.8 | 1.7 |
| DR731(DR587-DR232) | 49737 | 3.0 | 2.8 |
| DR732(DR587-DR233) | 596023 | 35.7 | 33.2 |
| DR733(DR587-DR234) | 562814 | 33.8 | 31.4 |
| DR734(DR588-DR229) | 641028 | 38.4 | 35.7 |
| DR735(DR588-DR230) | 757479 | 45.4 | 42.2 |
| DR736(DR588-DR231) | 1455626 | 87.3 | 81.2 |
| DR737(DR588-DR232) | 308300 | 18.5 | 17.2 |
| DR738(DR588-DR233) | 29645 | 1.8 | 1.7 |
| DR739(DR588-DR234) | 279562 | 16.8 | 15.6 |
| DR740(DR589-DR229) | 517465 | 31.0 | 28.9 |
| DR741(DR589-DR230) | 181177 | 10.9 | 10.1 |
| DR742(DR589-DR231) | 102522 | 6.1 | 5.7 |
| DR743(DR589-DR232) | 12119 | 0.7 | 0.7 |
| DR744(DR589-DR233) | 709867 | 42.6 | 39.6 |
| DR745(DR589-DR234) | 552283 | 33.1 | 30.8 |
| DR746(DR590-DR229) | 638377 | 38.3 | 35.6 |
| DR747(DR590-DR230) | 713175 | 42.8 | 39.8 |
| DR748(DR590-DR231) | 407832 | 24.5 | 22.7 |
| DR749(DR590-DR232) | 100488 | 6.0 | 5.6 |
| DR750(DR590-DR233) | 32777 | 2.0 | 1.8 |
| DR751(DR590-DR234) | 30496 | 1.8 | 1.7 |
| medium | 16672 | 1.0 | 0.9 |
| IL2 | 1793477 | 107.6 | 100.0 |

[0564] In addition, EC50 values for proliferation and IFNγ production were determined for 36 Anti-IL2Rβ/γ V_{H}H²'s. Purified NK cells from 4 different donors were resuspended at 2 million cells/mL in PBS. Anti-IL2Rβ/γ V_{H}H²'s or human IL-2 were titrated into 96-well plates (Falcon) starting at 200 nM in 75 μl DPBS and 6 times 10 fold diluted. 100 thousand NK cells were added per well in 75 μl DPBS. Controls included wells without anti-IL2Rβ/γ V_{H}H²'s or human IL-2 (media). Plates were transferred to a humidified incubator (ThermoFisher) and incubated at 37 degrees centigrade, 5 percent carbon dioxide for 5 days and proliferation and IFNγ production measured as above.

[0565] To determine the EC50 of each anti-IL2Rβ/γ V_{H}H²'s variant upon proliferation and IFNγ production, IFNγ MSD and Celltiterglo luminescence signal values for cells treated with anti-IL2Rβ/γ V_{H}H²'s and human IL-2 were analyzed by 4 parameter Nonlinear Regression on log transformed concentration values using Prism GraphPad software. Emax values were compared to those obtained for control cells treated with growth medium alone to yield a fold induction. The data from these experiments is presented in Table 14 and Table 15.

[0566] In this assay anti-IL2Rβ/γ V_{H}H²'s induced STAT5 proliferation and IFNγ production by human NK cells at distinct EC50 values and Emax values, and relative potency was conserved between donors.

TABLE 14
Proliferation and IFN γ production induced by anti-
IL2Rβ/γ VHH2 on Primary NK Cells

| | EC50 Proliferation | | EC50 IFNg Production | |
|---|---|---|---|---|
| anti-IL2Rβ/γ V_{H}H² | (pM) | | (pM) | |
| Construct | D56 | D97 | D56 | D97 |
| DR634(DR229-DR583) | 26 | 122 | 191 | 901 |
| DR635(DR229-DR584) | 52 | 148 | 1351 | 4558 |
| DR636(DR229-DR585) | 12164 | 25956 | 82659 | 522998 |
| DR638(DR229-DR587) | 10 | 19 | 223 | 1119 |
| DR639(DR229-DR588) | 62 | 185 | 20132 | 2235 |
| DR642(DR230-DR214) | 197 | 448 | 13151 | 11841 |
| DR643(DR230-DR217) | 28386 | 5100 | 156294 | 165620 |
| DR644(DR230-DR583) | 46 | 136 | 347 | 1009 |
| DR645(DR230-DR584) | 52 | 111 | 902 | 1734 |
| DR648(DR230-DR587) | 15 | 29 | 917 | 1442 |
| DR652(DR231-DR214) | 360 | 545 | 12857 | 34076 |
| DR655(DR231-DR584) | 234 | 1264 | 1034 | 2338 |
| DR656(DR231-DR585) | 16699 | 9265 | 301488 | 41214 |
| DR671(DR232-DR590) | 2667 | 13293 | 7982 | 36578 |
| DR674(DR233-DR583) | 257 | 186 | 5674 | 1986 |
| DR675(DR233-DR584) | 2661 | 844 | 22139 | 23915 |
| DR676(DR233-DR584) | 22073 | 11619 | 1286547 | 80838 |
| DR678(DR233-DR587) | 250 | 119 | 8234 | 7726 |
| DR679(DR233-DR588) | 5961 | 1254 | 40260 | 43815 |
| DR680(DR233-DR589) | 63518 | 17040 | 23035459 | 31157 |
| DR681(DR233-DR590) | NA | NA | 86809404 | 1.637 |
| DR682(DR234-DR214) | 3884 | 6421 | 12202 | 26022 |
| DR688(DR234-DR587) | 85 | 169 | 278 | 1842 |
| DR696(DR214-DR233) | 89543 | NA | 124132 | 21966 |
| DR714(DR584-DR233) | 70327 | 77963 | 311382317 | 660555722 |
| DR716(DR585-DR229) | 658 | 207 | 7300 | 3723 |
| DR717(DR585-DR230) | 621 | 550 | 3674 | 2560 |
| DR718(DR585-DR231) | 1712 | 461 | 16435 | 15917 |
| DR719(DR585-DR232) | 16556 | 2436 | 186469 | 40742 |
| DR720(DR585-DR233) | 24996 | 11540 | 177733 | 33994 |
| DR721(DR585-DR234) | 229 | 267 | 3129 | 8619 |
| DR736(DR588-DR231) | 886 | 712 | 12901 | 36398 |
| DR740(DR589-DR229) | 82708 | 23452 | 329845362 | 335393846 |
| DR741(DR589-DR230) | 40149 | 616219 | 131864 | 629271484 |
| DR744(DR589-DR233) | 175279 | 144690027 | 226140856 | 545550061 |
| DR747(DR590-DR230) | 304 | 316 | 1169 | 2414 |
| IL-2 | 350 | 275 | 122 | 9285 |

NA: Not Available. D56: Donor 56. D97: Donor 97.

TABLE 15
Proliferation and IFNγ production induced by anti-
IL2Rβ/γ VHH2 on Primary NK Cells

| | | | Emax IFNg | |
|---|---|---|---|---|
| | Emax Proliferation | | Production | |
| | (Fold over | | (Fold over | |
| anti-IL2Rβ/γ V_{H}H² | media control) | | media control) | |
| Construct | D56 | D97 | D56 | D97 |
| DR634(DR229-DR583) | 11.0 | 3.7 | 28 | 36 |
| DR635(DR229-DR584) | 9.7 | 3.2 | 73 | 106 |
| DR636(DR229-DR585) | 8.1 | 3.8 | 6 | 4 |
| DR638(DR229-DR587) | 8.5 | 3.5 | 105 | 142 |
| DR639(DR229-DR588) | 10.2 | 3.8 | 51 | 42 |
| DR642(DR230-DR214) | 10.5 | 3.2 | 71 | 70 |
| DR643(DR230-DR217) | 15.9 | 3.3 | 17 | 10 |
| DR644(DR230-DR583) | 8.5 | 4.2 | 9 | 7 |
| DR645(DR230-DR584) | 11.1 | 4.3 | 66 | 82 |
| DR648(DR230-DR587) | 10.9 | 4.1 | 98 | 142 |
| DR652(DR231-DR214) | 10.8 | 4.2 | 97 | 162 |
| DR655(DR231-DR584) | 4.9 | 2.6 | 3 | 2 |
| DR656(DR231-DR585) | 14.3 | 4.0 | 26 | 15 |
| DR671(DR232-DR590) | 4.5 | 2.3 | 2 | 3 |
| DR674(DR233-DR583) | 11.7 | 3.8 | 27 | 25 |
| DR675(DR233-DR584) | 15.4 | 5.1 | 67 | 81 |
| DR676(DR233-DR584) | 7.6 | 3.6 | 4 | 4 |
| DR678(DR233-DR587) | 10.6 | 4.5 | 73 | 126 |
| DR679(DR233-DR588) | 12.4 | 4.2 | 16 | 21 |
| DR680(DR233-DR589) | 10.2 | 3.4 | 3 | 3 |
| DR681(DR233-DR590) | 1.6 | 1.6 | 1 | 1 |
| DR682(DR234-DR214) | 9.6 | 3.9 | 7 | 5 |
| DR688(DR234-DR587) | 9.9 | 4.3 | 14 | 14 |
| DR696(DR214-DR233) | 5.2 | 2.3 | 1 | 1 |
| DR714(DR584-DR233) | 9.5 | 3.3 | 5 | 3 |
| DR716(DR585-DR229) | 12.2 | 5.1 | 28 | 29 |
| DR717(DR585-DR230) | 12.3 | 4.8 | 24 | 22 |
| DR718(DR585-DR231) | 14.9 | 5.4 | 66 | 88 |
| DR719(DR585-DR232) | 19.7 | 5.3 | 30 | 21 |
| DR720(DR585-DR233) | 9.7 | 3.4 | 5 | 4 |
| DR721(DR585-DR234) | 12.0 | 4.2 | 87 | 82 |
| DR736(DR588-DR231) | 12.5 | 4.5 | 35 | 31 |
| DR740(DR589-DR229) | 5.0 | 2.0 | 2 | 1 |
| DR741(DR589-DR230) | 7.0 | 2.9 | 3 | 2 |
| DR744(DR589-DR233) | 5.5 | 2.1 | 2 | 1 |
| DR747(DR590-DR230) | 10.3 | 4.6 | 16 | 13 |
| IL-2 | 9.9 | 4.1 | 128 | 175 |

NA: Not Available. D56: Donor 56. D97: Donor 97.

### Example 12—Evaluation of Activity of anti-IL2Rβ/γ V_{H}H²s In Primary Activated CD8 Positive T Cell Blasts: STAT5

[0567] The anti-IL2Rβ/γ V_{H}H²s were evaluated for activity in primary CD3/CD28 activated CD8 positive T cell blasts isolated and generated from human peripheral blood. Activated CD8 positive T Cell blasts express IL2Rβ and IL2Rγ chains and are able to phosphorylate STAT5, proliferate and produce IFN-γ in response to IL2 receptor signaling.

[0568] CD8 T cells were isolated form peripheral blood of healthy donors collected in Leukoreduction System (LRS) Chambers at the Stanford Blood Bank (Palo Alto). Briefly, PBMC were isolated from LRS Chambers using the human Buffy Coat/LRSC PBMC Isolation Kit (Miltenyi). LRS Chambers were harvested in separation buffer (DPBS, 0.5% BSA, 2 mM EDTA) and mixed with sedimentation buffer and Red Blood Cell (RBC) removal antibodies and EDTA at a final concentration of 5 mM in 50 mL Centrifuge tubes. Tubes were centrifuged at 50×g for 3 minutes at room temperature. Supernatant with cells was collected and transferred to a new 50 mL centrifuge tube and separation buffer was added to 50 mL. Tubes were centrifuged at 300×g for 5 minutes at room temperature and supernatant discarded. Cell pellets were resuspended in 4 mL separation buffer and 2 mL Erythrocyte Depletion Microbeads and 1 mL Granulocyte Depletion Microbeads were added. Cells were incubated for 10 minutes at 2-8 degrees centigrade and PBMC were isolated on an AutoMacs Pro instrument (Miltenyi) using protocol ‘Cult 5’. PBMC were counted on a Vi-Cell XR instrument (Beckman).

[0569] PBMC were cultured in growth medium consisting of Yssel's medium (Iscove's modified Dulbecco's Medium (ThermoFisher), 0.25% w/v percent human albumin (Sigma), 1 percent penicillin/streptomycin (ThermoFisher), 1 percent ITS-X Insulin, Transferrin, Selenium (Gibco), 30 mg/L Tansferrin (Roche), 2 mg/L Palmitic Acid (Sigma), 1 percent LA-OA-Albumin Linoleic Acid, Oleic Acid (Sigma), 1 percent human serum (Gemini) (Yssel et al (1984) J Immunol Methods 72: 219-227) at 1 million cells per ml with 1 μg/mL anti-CD3 mAb (OKT3 Biolegend) and 1 μg/mL anti-CD28 mAb (28.1 Biolegend) for 72 hrs.

[0570] Activated CD8 positive T cell blasts were isolated form PBMC by positive selection using CD8 Microbeads (Miltenyi). Briefly, 0.5 billion PBMC were incubated with 1 mL CD8 Microbeads and incubated for 15 minutes at 2-8 degrees centigrade. Cells were washed, resuspended in separation buffer and activated CD8 positive T cell blasts isolated on an AutoMacs Pro instrument (Miltenyi) using protocol ‘possel’. Activated CD8 positive T cell blasts were counted on a Vi-Cell XR instrument (Beckman).

[0571] Prior to the experiment activated CD8 positive T cell blasts were centrifuged and washed in DPBS twice. Cells were resuspended at 2 million cells/mL in PBS. Anti-IL2Rβ/γ V_{H}H²s were diluted into 96-well plates (Falcon) to 30 nM in 50 μl DPBS and 100 thousand activated CD8 positive T cell blasts were added per well in 50 μl DPBS. Controls included wells without anti-IL2Rβ/γ V_{H}H²s or human IL2 (media) and wells with human IL2 at a final concentration of 100 pM. Plates were transferred to a humidified incubator (ThermoFisher) and incubated at 37 degrees centigrade, 5 percent carbon dioxide for 20 min.

[0572] Plates were removed from the incubator and cells were lysed by adding 100 μl per well of Tris Lysis buffer supplemented with Protease Inhibitor Solution, Phosphatase Inhibitor I and Phosphatase Inhibitor II from MSD Multispot Assay System Phospho-STAT Panel Kit (MSD K15202D) according to manufacturer's instructions. Plates were incubated on ice for 15 minutes and centrifuged at 600×g for 6 minutes. Cell lysates were transferred to a new 96 well plate.

[0573] Induction of STAT5 phosphorylation was measured in the cell lysates using the MSD Multispot Assay System Phospho-STAT Panel (MSD K15202D) according to manufacturer's instructions. Briefly, mAb precoated MSD Phospho-STAT panel assay plates were incubated with 150 μL per well Blocker A in Tris Wash Buffer at 30 mg/mL for 60 min on an orbital shaker (VWR Scientific) at 300 rpm at room temperature. Plates were washed 3 times with Tris Wash Buffer and 30 μL Cell lysates were added per well. Plates were incubated for 60 min on an orbital shaker (VWR Scientific) at 300 rpm at room temperature. Plates were washed 3 times with Tris Wash Buffer and 25 μL 1×detection antibody in 10 mg/mL Blocker A in Tris Wash Buffer was added to each well. Plates were incubated for 60 min on an orbital shaker (VWR Scientific) at 300 rpm at room temperature. Plates were washed 3 times with Tris Wash Buffer and 150 μL 1× Read Buffer T was added to each well and Luminescence signal was read on a Mesoscale Quickplex SQ 120 instrument

[0574] To compare the effect of each anti-IL2Rβ/γ V_{H}H²s variant upon activated CD8 positive T cell blasts STAT5 phosphorylation, MSD luminescence signal values for cells treated with anti-IL2Rβ/γ V_{H}H²s were compared to those obtained for control cells treated with growth medium alone to yield a fold induction and with control cells treated with human IL2 to yield an activity relative to the response to IL2 as a percentage. The data from these experiments is presented in Table 18.

[0575] In this assay 48/120 anti-IL2Rβ/γ V_{H}H²s induced STAT5 phosphorylation in activated CD8 T cell blasts at distinct levels (Fold>1), but not above levels observed with IL2 at 100 pM.

TABLE 18
pSTAT5 Induction by anti-IL2Rβ/γ
V_{H}H² on activated CD8 T cell blasts

| | | Relative | Relative |
|---|---|---|---|
| | CD8 blasts | pSTAT5 | pSTAT5 |
| | pSTAT5 | Induction | Induction |
| Anti-IL2Rβ/γ V_{H}H² | Induction | (fold | (% hIL2 |
| Construct | (MSD Signal) | induction) | response) |
| DR632(DR229-DR214) | 1975 | 0.4 | 0.4 |
| DR633(DR229-DR217) | 2802 | 0.5 | 0.5 |
| DR634(DR229-DR583) | 7119 | 1.4 | 1.4 |
| DR635(DR229-DR584) | 69738 | 13.3 | 13.3 |
| DR636(DR229-DR585) | 4305 | 0.8 | 0.8 |
| DR637(DR229-DR586) | 3152 | 0.6 | 0.6 |
| DR638(DR229-DR587) | 67754 | 12.9 | 12.9 |
| DR639(DR229-DR587) | 29763 | 5.7 | 5.7 |
| DR640(DR229-DR589) | 15645 | 3.0 | 3.0 |
| DR641(DR229-DR590) | 2566 | 0.5 | 0.5 |
| DR642(DR230-DR214) | 37103 | 7.0 | 7.0 |
| DR643(DR230-DR217) | 83861 | 15.9 | 15.9 |
| DR644(DR230-DR583) | 5757 | 1.1 | 1.1 |
| DR645(DR230-DR584) | 46494 | 8.8 | 8.8 |
| DR646(DR230-DR585) | 11691 | 2.2 | 2.2 |
| DR647(DR230-DR586) | 88561 | 16.8 | 16.8 |
| DR648(DR230-DR587) | 55433 | 10.5 | 10.5 |
| DR649(DR230-DR588) | 2353 | 0.4 | 0.4 |
| DR650(DR230-DR589) | 4356 | 0.8 | 0.8 |
| DR651(DR230-DR590) | 4380 | 0.8 | 0.8 |
| DR652(DR231-DR214) | 62461 | 11.9 | 11.9 |
| DR653(DR231-DR217) | 2241 | 0.4 | 0.4 |
| DR654(DR231-DR583) | 3512 | 0.7 | 0.7 |
| DR655(DR231-DR584) | 10601 | 2.0 | 2.0 |
| DR656(DR231-DR585) | 31725 | 6.0 | 6.0 |
| DR657(DR231-DR586) | 5973 | 1.1 | 1.1 |
| DR658(DR231-DR587) | 2572 | 0.5 | 0.5 |
| DR659(DR231-DR588) | 2262 | 0.4 | 0.4 |
| DR660(DR231-DR589) | 4159 | 0.8 | 0.8 |
| DR661(DR231-DR590) | 4637 | 0.9 | 0.9 |
| DR662(DR232-DR214) | 3144 | 0.6 | 0.6 |
| DR663(DR232-DR217) | 3041 | 0.6 | 0.6 |
| DR664(DR232-DR583) | 10939 | 2.1 | 2.1 |
| DR665(DR232-DR584) | 4927 | 0.9 | 0.9 |
| DR666(DR232-DR585) | 2936 | 0.6 | 0.6 |
| DR667(DR232-DR586) | 3221 | 0.6 | 0.6 |
| DR668(DR232-DR587) | 4857 | 0.9 | 0.9 |
| DR669(DR232-DR588) | 7147 | 1.4 | 1.4 |
| DR670(DR232-DR589) | 3756 | 0.7 | 0.7 |
| DR671(DR232-DR590) | 6860 | 1.3 | 1.3 |
| DR672(DR233-DR214) | 19482 | 3.7 | 3.7 |
| DR673(DR233-DR217) | 15296 | 2.9 | 2.9 |
| DR674(DR233-DR583) | 29097 | 5.5 | 5.5 |
| DR675(DR233-DR584) | 16694 | 3.2 | 3.2 |
| DR676(DR233-DR584) | 6983 | 1.3 | 1.3 |
| DR677(DR233-DR586) | 5021 | 1.0 | 1.0 |
| DR678(DR233-DR587) | 71073 | 13.5 | 13.5 |
| DR679(DR233-DR588) | 9245 | 1.8 | 1.8 |
| DR680(DR233-DR589) | 35467 | 6.7 | 6.7 |
| DR681(DR233-DR590) | 14232 | 2.7 | 2.7 |
| DR682(DR234-DR214) | 6798 | 1.3 | 1.3 |
| DR683(DR234-DR217) | 6461 | 1.2 | 1.2 |
| DR684(DR234-DR583) | 3136 | 0.6 | 0.6 |
| DR685(DR234-DR584) | 11098 | 2.1 | 2.1 |
| DR686(DR234-DR585) | 5015 | 1.0 | 1.0 |
| DR687(DR234-DR586) | 5052 | 1.0 | 1.0 |
| DR688(DR234-DR587) | 20746 | 3.9 | 3.9 |
| DR689(DR234-DR588) | 29909 | 5.7 | 5.7 |
| DR690(DR234-DR589) | 8260 | 1.6 | 1.6 |
| DR691(DR234-DR590) | 3327 | 0.6 | 0.6 |
| DR692(DR214-DR229) | 7796 | 1.5 | 1.5 |
| DR693(DR214-DR230) | 5864 | 1.1 | 1.1 |
| DR694(DR214-DR231) | 4098 | 0.8 | 0.8 |
| DR695(DR214-DR232) | 4808 | 0.9 | 0.9 |
| DR696(DR214-DR233) | 4670 | 0.9 | 0.9 |
| DR697(DR214-DR234) | 4911 | 0.9 | 0.9 |
| DR698(DR217-DR229) | 4409 | 0.8 | 0.8 |
| DR699(DR217-DR230) | 3101 | 0.6 | 0.6 |
| DR700(DR217-DR231) | 6717 | 1.3 | 1.3 |
| DR701(DR217-DR232) | 40130 | 7.6 | 7.6 |
| DR702(DR217-DR233) | 6388 | 1.2 | 1.2 |
| DR703(DR217-DR234) | 2112 | 0.4 | 0.4 |
| DR704(DR583-DR229) | 3828 | 0.7 | 0.7 |
| DR705(DR583-DR230) | 3977 | 0.8 | 0.8 |
| DR706(DR583-DR231) | 2996 | 0.6 | 0.6 |
| DR707(DR583-DR232) | 4123 | 0.8 | 0.8 |
| DR708(DR583-DR233) | 4414 | 0.8 | 0.8 |
| DR709(DR583-DR234) | 3552 | 0.7 | 0.7 |
| DR710(DR584-DR229) | 4380 | 0.8 | 0.8 |
| DR711(DR584-DR230) | 3083 | 0.6 | 0.6 |
| DR712(DR584-DR231) | 4739 | 0.9 | 0.9 |
| DR713(DR584-DR232) | 4168 | 0.8 | 0.8 |
| DR714(DR584-DR233) | 3885 | 0.7 | 0.7 |
| DR715(DR584-DR234) | 3414 | 0.6 | 0.6 |
| DR716(DR585-DR229) | 47906 | 9.1 | 9.1 |
| DR717(DR585-DR230) | 19829 | 3.8 | 3.8 |
| DR718(DR585-DR231) | 99121 | 18.8 | 18.8 |
| DR719(DR585-DR232) | 41612 | 7.9 | 7.9 |
| DR720(DR585-DR233) | 29633 | 5.6 | 5.6 |
| DR721(DR585-DR234) | 48028 | 9.1 | 9.1 |
| DR722(DR586-DR229) | 68270 | 13.0 | 13.0 |
| DR723(DR586-DR230) | 2669 | 0.5 | 0.5 |
| DR724(DR586-DR231) | 78186 | 14.9 | 14.9 |
| DR725(DR586-DR232) | 2018 | 0.4 | 0.4 |
| DR726(DR586-DR233) | 3643 | 0.7 | 0.7 |
| DR727(DR586-DR234) | 555 | 0.1 | 0.1 |
| DR728(DR587-DR229) | 3292 | 0.6 | 0.6 |
| DR729(DR587-DR230) | 3154 | 0.6 | 0.6 |
| DR730(DR587-DR231) | 2908 | 0.6 | 0.6 |
| DR731(DR587-DR232) | 1983 | 0.4 | 0.4 |
| DR732(DR587-DR233) | 2854 | 0.5 | 0.5 |
| DR733(DR587-DR234) | 2417 | 0.5 | 0.5 |
| DR734(DR588-DR229) | 4609 | 0.9 | 0.9 |
| DR735(DR588-DR230) | 2445 | 0.5 | 0.5 |
| DR736(DR588-DR231) | 9338 | 1.8 | 1.8 |
| DR737(DR588-DR232) | 2946 | 0.6 | 0.6 |
| DR738(DR588-DR233) | 2876 | 0.5 | 0.5 |
| DR739(DR588-DR234) | 2011 | 0.4 | 0.4 |
| DR740(DR589-DR229) | 3880 | 0.7 | 0.7 |
| DR741(DR589-DR230) | 3493 | 0.7 | 0.7 |
| DR742(DR589-DR231) | 2713 | 0.5 | 0.5 |
| DR743(DR589-DR232) | 1579 | 0.3 | 0.3 |
| DR744(DR589-DR233) | 3969 | 0.8 | 0.8 |
| DR745(DR589-DR234) | 1741 | 0.3 | 0.3 |
| DR746(DR590-DR229) | 2869 | 0.5 | 0.5 |
| DR747(DR590-DR230) | 2890 | 0.5 | 0.5 |
| DR748(DR590-DR231) | 4161 | 0.8 | 0.8 |
| DR749(DR590-DR232) | 1252 | 0.2 | 0.2 |
| DR750(DR590-DR233) | 2182 | 0.4 | 0.4 |
| DR751(DR590-DR234) | 955 | 0.2 | 0.2 |
| medium | 5263 | 1.0 | 4.0 |
| IL2 | 130278 | 24.8 | 100.0 |

### Example 13—Evaluation of Activity of anti-IL2Rβ/γ V_{H}H²s In Primary Activated CD8 Positive T Cell Blasts: Proliferation and IFNγ Production

[0576] The anti-IL2Rβ/γ V_{H}H²s were evaluated for activity in primary CD3/CD28 activated CD8 positive T cell blasts isolated and generated from human peripheral blood. Activated CD8 positive T Cell blasts express IL2Rβ and IL2Rγ chains and are able to phosphorylate STAT5, proliferate and produce IFN-γ in response to IL2 receptor signaling.

[0577] CD8 T cells were isolated form peripheral blood of healthy donors collected in Leukoreduction System (LRS) Chambers at the Stanford Blood Bank (Palo Alto). Briefly, PBMC were isolated from LRS Chambers using the human Buffy Coat/LRSC PBMC Isolation Kit (Miltenyi). LRS Chambers were harvested in separation buffer (DPBS, 0.5% BSA, 2 mM EDTA) and mixed with sedimentation buffer and Red Blood Cell (RBC) removal antibodies and EDTA at a final concentration of 5 mM in 50 mL Centrifuge tubes. Tubes were centrifuged at 50×g for 3 minutes at room temperature. Supernatant with cells was collected and transferred to a new 50 mL centrifuge tube and separation buffer was added to 50 mL. Tubes were centrifuged at 300×g for 5 minutes at room temperature and supernatant discarded. Cell pellets were resuspended in 4 mL separation buffer and 2 mL Erythrocyte Depletion Microbeads and 1 mL Granulocyte Depletion Microbeads were added. Cells were incubated for 10 minutes at 2-8 degrees centigrade and PBMC were isolated on an AutoMacs Pro instrument (Miltenyi) using protocol ‘Cult 5’. PBMC were counted on a Vi-Cell XR instrument (Beckman).

[0578] PBMC were cultured in growth medium consisting of Yssel's medium (Iscove's modified Dulbecco's Medium (ThermoFisher), 0.25% w/v percent human albumin (Sigma), 1 percent penicillin/streptomycin (ThermoFisher), 1 percent ITS-X Insulin, Transferrin, Selenium (Gibco), 30 mg/L Tansferrin (Roche), 2 mg/L Palmitic Acid (Sigma), 1 percent LA-OA-Albumin Linoleic Acid, Oleic Acid (Sigma), 1 percent human serum (Gemini) (Yssel et al (1984) J Immunol Methods 72: 219-227) at 1 million cells per ml with 1 μg/mL anti-CD3 mAb (OKT3 Biolegend) and 1 μg/mL anti-CD28 mAb (28.1 Biolegend) for 72 hrs.

[0579] Activated CD8 positive T cell blasts were isolated form PBMC by positive selection using CD8 Microbeads (Miltenyi). Briefly, 0.5 billion PBMC were incubated with 1 mL CD8 Microbeads and incubated for 15 minutes at 2-8 degrees centigrade. Cells were washed, resuspended in separation buffer and activated CD8 positive T cell blasts isolated on an AutoMacs Pro instrument (Miltenyi) using protocol ‘possel’. Activated CD8 positive T cell blasts were counted on a Vi-Cell XR instrument (Beckman).

[0580] Prior to the experiment activated CD8 positive T cell blasts were centrifuged and washed in DPBS twice. Cells were resuspended at 1 million cells/mL in growth medium consisting of Yssel's medium (Iscove's modified Dulbecco's Medium (ThermoFisher), 0.25% w/v percent human albumin (Sigma), 1 percent penicillin/streptomycin (ThermoFisher), 1 percent ITS-X Insulin, Transferrin, Selenium (Gibco), 30 mg/L Tansferrin (Roche), 2 mg/L Palmitic Acid (Sigma), 1 percent LA-OA-Albumin Linoleic Acid, Oleic Acid (Sigma), 1 percent human serum (Gemini) (Yssel et al (1984) J Immunol Methods 72: 219-227). Anti-IL2Rβ/γ V_{H}H²s were diluted into 96-well plates (Falcon) to 30 nM in 75 μl Yssel's medium and 50 thousand activated CD8 positive T cell blasts were added per well in 75 μl DPBS. Controls included wells without anti-IL2Rβ/γ V_{H}H²s or human IL2 (media) and wells with human IL2 at a final concentration of 100 pM. Plates were transferred to a humidified incubator (ThermoFisher) and incubated at 37 degrees centigrade, 5 percent carbon dioxide for 5 days.

[0581] Plates were removed from the incubator and 50 μl of culture supernatant was harvested in to a 96 well flat bottom plate (Costar). Cells were lysed by adding 100 μl per well of Celltiterglo (Promega) according to manufacturer's instructions. Cell lysates were mixed on an orbital shaker (VWR Scientific) for two minutes at 300 rpm then held at room temperature for 10 minutes. Luminescence for activated CD8 positive T cell blasts lysates was read as counts per second on an Envision 2103 Multilabel Plate Reader (Perkin Elmer).

[0582] Production of IFNγ in the culture supernatants was measured using the MSD IFNγ V-Plex kit (MSD K151QOD) according to manufacturer's instructions. Briefly, mAb precoated MSD IFNγ assay plates were washed 3 times with 150 μL Tris Wash Buffer and IFNγ standards were diluted in Diluent 2. Culture supernatants were diluted 1:10 with Diluent 2 and 50 μL of samples and standards were added to the IFNγ assay plates and incubated for 120 min on an orbital shaker (VWR Scientific) at 300 rpm at room temperature. Plates were washed 3 times with Tris Wash Buffer and 25 μL 1×detection antibody in Diluent 3 was added to each well. Plates were incubated for 60 min on an orbital shaker (VWR Scientific) at 300 rpm at room temperature. Plates were washed 3 times with Tris Wash Buffer and 150 μL 2× Read Buffer T was added to each well and Luminescence signal was read on a Mesoscale Quickplex SQ 120 instrument. Concentration of IFNγ in the supernatants were calculated based on the standard curve with MSD Discovery Workbench software.

[0583] To compare the effect of each anti-IL2Rβ/γ V_{H}H²s variant upon activated CD8 positive T cell blasts proliferation and IFNγ production, Celltiterglo values and IFNγ concentrations for cells treated with anti-IL2Rβ/γ V_{H}H²s were compared to those obtained for control cells treated with growth medium alone to yield a fold induction and with control cells treated with human IL2 to yield an activity relative to the response to IL2 as a percentage. The data from these experiments is presented in Table 19 and Table 20.

[0584] In this assay 104/120 anti-IL2Rβ/γ V_{H}H²s induced activated CD8 positive T cell blasts proliferation (>1Fold) at distinct levels, and 28/120 anti-IL2Rβ/γ V_{H}H²s above levels observed with IL2 at 100 pM. In this assay 76/120 anti-IL2Rβ/γ V_{H}H²s induced activated CD8 positive T cell blasts IFNγ production (>1Fold) at distinct levels, but not above levels observed with IL2 at 100 pM.

TABLE 19
Proliferation Induced by anti-IL2Rβ/γ
V_{H}H² on activated CD8 T cell blasts

| | | Relative | Relative |
|---|---|---|---|
| | CD8 blasts | Proliferation | Proliferation |
| | Proliferation | Induction | Induction |
| Anti-IL2Rβ/γ V_{H}H² | Induction | (fold | (% hIL2 |
| Construct | CTG (cpm) | induction) | response) |
| DR632(DR229-DR214) | 74694 | 1.6 | 52.0 |
| DR633(DR229-DR217) | 97528 | 2.1 | 67.9 |
| DR634(DR229-DR583) | 169082 | 3.6 | 117.8 |
| DR635(DR229-DR584) | 199810 | 4.3 | 139.2 |
| DR636(DR229-DR585) | 96650 | 2.1 | 67.3 |
| DR637(DR229-DR586) | 96020 | 2.1 | 66.9 |
| DR638(DR229-DR587) | 196596 | 4.2 | 136.9 |
| DR639(DR229-DR587) | 186708 | 4.0 | 130.0 |
| DR640(DR229-DR589) | 166848 | 3.6 | 116.2 |
| DR641(DR229-DR590) | 59040 | 1.3 | 41.1 |
| DR642(DR230-DR214) | 169256 | 3.6 | 117.9 |
| DR643(DR230-DR217) | 199372 | 4.3 | 138.8 |
| DR644(DR230-DR583) | 150086 | 3.2 | 104.5 |
| DR645(DR230-DR584) | 234368 | 5.0 | 163.2 |
| DR646(DR230-DR585) | 100966 | 2.2 | 70.3 |
| DR647(DR230-DR586) | 207848 | 4.5 | 144.7 |
| DR648(DR230-DR587) | 193526 | 4.2 | 134.8 |
| DR649(DR230-DR588) | 89156 | 1.9 | 62.1 |
| DR650(DR230-DR589) | 59650 | 1.3 | 41.5 |
| DR651(DR230-DR590) | 60920 | 1.3 | 42.4 |
| DR652(DR231-DR214) | 214638 | 4.6 | 149.5 |
| DR653(DR231-DR217) | 68142 | 1.5 | 47.5 |
| DR654(DR231-DR583) | 64188 | 1.4 | 44.7 |
| DR655(DR231-DR584) | 96790 | 2.1 | 67.4 |
| DR656(DR231-DR585) | 149116 | 3.2 | 103.8 |
| DR657(DR231-DR586) | 68418 | 1.5 | 47.6 |
| DR658(DR231-DR587) | 50934 | 1.1 | 35.5 |
| DR659(DR231-DR588) | 78852 | 1.7 | 54.9 |
| DR660(DR231-DR589) | 70632 | 1.5 | 49.2 |
| DR661(DR231-DR590) | 61506 | 1.3 | 42.8 |
| DR662(DR232-DR214) | 58280 | 1.3 | 40.6 |
| DR663(DR232-DR217) | 127604 | 2.7 | 88.9 |
| DR664(DR232-DR583) | 99388 | 2.1 | 69.2 |
| DR665(DR232-DR584) | 60210 | 1.3 | 41.9 |
| DR666(DR232-DR585) | 57460 | 1.2 | 40.0 |
| DR667(DR232-DR586) | 123146 | 2.7 | 85.8 |
| DR668(DR232-DR587) | 77298 | 1.7 | 53.8 |
| DR669(DR232-DR588) | 78226 | 1.7 | 54.5 |
| DR670(DR232-DR589) | 90720 | 2.0 | 63.2 |
| DR671(DR232-DR590) | 142454 | 3.1 | 99.2 |
| DR672(DR233-DR214) | 170126 | 3.7 | 118.5 |
| DR673(DR233-DR217) | 188860 | 4.1 | 131.5 |
| DR674(DR233-DR583) | 175798 | 3.8 | 122.4 |
| DR675(DR233-DR584) | 182374 | 3.9 | 127.0 |
| DR676(DR233-DR584) | 102448 | 2.2 | 71.3 |
| DR677(DR233-DR586) | 112872 | 2.4 | 78.6 |
| DR678(DR233-DR587) | 196456 | 4.2 | 136.8 |
| DR679(DR233-DR588) | 172512 | 3.7 | 120.1 |
| DR680(DR233-DR589) | 140116 | 3.0 | 97.6 |
| DR681(DR233-DR590) | 110932 | 2.4 | 77.3 |
| DR682(DR234-DR214) | 113696 | 2.4 | 79.2 |
| DR683(DR234-DR217) | 87860 | 1.9 | 61.2 |
| DR684(DR234-DR583) | 48908 | 1.1 | 34.1 |
| DR685(DR234-DR584) | 112190 | 2.4 | 78.1 |
| DR686(DR234-DR585) | 68192 | 1.5 | 47.5 |
| DR687(DR234-DR586) | 76202 | 1.6 | 53.1 |
| DR688(DR234-DR587) | 113120 | 2.4 | 78.8 |
| DR689(DR234-DR588) | 153806 | 3.3 | 107.1 |
| DR690(DR234-DR589) | 106106 | 2.3 | 73.9 |
| DR691(DR234-DR590) | 63728 | 1.4 | 44.4 |
| DR692(DR214-DR229) | 81058 | 1.7 | 56.4 |
| DR693(DR214-DR230) | 74190 | 1.6 | 51.7 |
| DR694(DR214-DR231) | 53506 | 1.2 | 37.3 |
| DR695(DR214-DR232) | 73792 | 1.6 | 51.4 |
| DR696(DR214-DR233) | 75228 | 1.6 | 52.4 |
| DR697(DR214-DR234) | 76072 | 1.6 | 53.0 |
| DR698(DR217-DR229) | 59082 | 1.3 | 41.1 |
| DR699(DR217-DR230) | 67000 | 1.4 | 46.7 |
| DR700(DR217-DR231) | 72854 | 1.6 | 50.7 |
| DR701(DR217-DR232) | 151010 | 3.3 | 105.2 |
| DR702(DR217-DR233) | 83172 | 1.8 | 57.9 |
| DR703(DR217-DR234) | 73744 | 1.6 | 51.4 |
| DR704(DR583-DR229) | 47968 | 1.0 | 33.4 |
| DR705(DR583-DR230) | 53554 | 1.2 | 37.3 |
| DR706(DR583-DR231) | 43828 | 0.9 | 30.5 |
| DR707(DR583-DR232) | 51940 | 1.1 | 36.2 |
| DR708(DR583-DR233) | 50450 | 1.1 | 35.1 |
| DR709(DR583-DR234) | 52870 | 1.1 | 36.8 |
| DR710(DR584-DR229) | 41228 | 0.9 | 28.7 |
| DR711(DR584-DR230) | 45988 | 1.0 | 32.0 |
| DR712(DR584-DR231) | 47854 | 1.0 | 33.3 |
| DR713(DR584-DR232) | 50962 | 1.1 | 35.5 |
| DR714(DR584-DR233) | 44376 | 1.0 | 30.9 |
| DR715(DR584-DR234) | 49586 | 1.1 | 34.5 |
| DR716(DR585-DR229) | 161498 | 3.5 | 112.5 |
| DR717(DR585-DR230) | 163070 | 3.5 | 113.6 |
| DR718(DR585-DR231) | 176680 | 3.8 | 123.0 |
| DR719(DR585-DR232) | 145996 | 3.1 | 101.7 |
| DR720(DR585-DR233) | 144204 | 3.1 | 100.4 |
| DR721(DR585-DR234) | 167206 | 3.6 | 116.4 |
| DR722(DR586-DR229) | 171340 | 3.7 | 119.3 |
| DR723(DR586-DR230) | 75522 | 1.6 | 52.6 |
| DR724(DR586-DR231) | 211052 | 4.5 | 147.0 |
| DR725(DR586-DR232) | 61316 | 1.3 | 42.7 |
| DR726(DR586-DR233) | 49710 | 1.1 | 34.6 |
| DR727(DR586-DR234) | 40706 | 0.9 | 28.3 |
| DR728(DR587-DR229) | 34304 | 0.7 | 23.9 |
| DR729(DR587-DR230) | 43390 | 0.9 | 30.2 |
| DR730(DR587-DR231) | 44146 | 1.0 | 30.7 |
| DR731(DR587-DR232) | 46354 | 1.0 | 32.3 |
| DR732(DR587-DR233) | 51346 | 1.1 | 35.8 |
| DR733(DR587-DR234) | 53770 | 1.2 | 37.4 |
| DR734(DR588-DR229) | 91694 | 2.0 | 63.9 |
| DR735(DR588-DR230) | 81412 | 1.8 | 56.7 |
| DR736(DR588-DR231) | 109598 | 2.4 | 76.3 |
| DR737(DR588-DR232) | 70134 | 1.5 | 48.8 |
| DR738(DR588-DR233) | 55678 | 1.2 | 38.8 |
| DR739(DR588-DR234) | 94516 | 2.0 | 65.8 |
| DR740(DR589-DR229) | 81458 | 1.8 | 56.7 |
| DR741(DR589-DR230) | 88854 | 1.9 | 61.9 |
| DR742(DR589-DR231) | 56044 | 1.2 | 39.0 |
| DR743(DR589-DR232) | 48310 | 1.0 | 33.6 |
| DR744(DR589-DR233) | 75144 | 1.6 | 52.3 |
| DR745(DR589-DR234) | 46104 | 1.0 | 32.1 |
| DR746(DR590-DR229) | 91978 | 2.0 | 64.1 |
| DR747(DR590-DR230) | 128022 | 2.8 | 89.2 |
| DR748(DR590-DR231) | 94978 | 2.0 | 66.1 |
| DR749(DR590-DR232) | 47614 | 1.0 | 33.2 |
| DR750(DR590-DR233) | 65174 | 1.4 | 45.4 |
| DR751(DR590-DR234) | 41294 | 0.9 | 28.8 |
| medium | 46428 | 1.0 | 32.3 |
| IL2 | 143593 | 3.1 | 100.0 |

TABLE 20
IFNγ production by anti-IL2Rβ/γ
V_{H}H² on activated CD8 T cell blasts

| | CD8 | Relative | Relative |
|---|---|---|---|
| | Cell | IFNγ | IFNγ |
| | IFNγ | Induction | Induction |
| Anti-IL2Rβ/γ V_{H}H² | Production | (fold | (% hIL2 |
| Construct | (pg/mL) | induction) | response) |
| DR632(DR229-DR214) | 357 | 1.5 | 4.0 |
| DR633(DR229-DR217) | 400 | 1.7 | 4.5 |
| DR634(DR229-DR583) | 3050 | 13.1 | 34.1 |
| DR635(DR229-DR584) | 6050 | 26.1 | 67.6 |
| DR636(DR229-DR585) | 364 | 1.6 | 4.1 |
| DR637(DR229-DR586) | 407 | 1.8 | 4.5 |
| DR638(DR229-DR587) | 4429 | 19.1 | 49.4 |
| DR639(DR229-DR587) | 2653 | 11.4 | 29.6 |
| DR640(DR229-DR589) | 1413 | 6.1 | 15.8 |
| DR641(DR229-DR590) | 176 | 0.8 | 2.0 |
| DR642(DR230-DR214) | 2125 | 9.2 | 23.7 |
| DR643(DR230-DR217) | 5021 | 21.6 | 56.1 |
| DR644(DR230-DR583) | 1077 | 4.6 | 12.0 |
| DR645(DR230-DR584) | 5761 | 24.8 | 64.3 |
| DR646(DR230-DR585) | 305 | 1.3 | 3.4 |
| DR647(DR230-DR586) | 4615 | 19.9 | 51.5 |
| DR648(DR230-DR587) | 3168 | 13.7 | 35.4 |
| DR649(DR230-DR588) | 388 | 1.7 | 4.3 |
| DR650(DR230-DR589) | 146 | 0.6 | 1.6 |
| DR651(DR230-DR590) | 157 | 0.7 | 1.7 |
| DR652(DR231-DR214) | 5290 | 22.8 | 59.1 |
| DR653(DR231-DR217) | 356 | 1.5 | 4.0 |
| DR654(DR231-DR583) | 131 | 0.6 | 1.5 |
| DR655(DR231-DR584) | 480 | 2.1 | 5.4 |
| DR656(DR231-DR585) | 2033 | 8.8 | 22.7 |
| DR657(DR231-DR586) | 193 | 0.8 | 2.2 |
| DR658(DR231-DR587) | 232 | 1.0 | 2.6 |
| DR659(DR231-DR588) | 281 | 1.2 | 3.1 |
| DR660(DR231-DR589) | 202 | 0.9 | 2.3 |
| DR661(DR231-DR590) | 186 | 0.8 | 2.1 |
| DR662(DR232-DR214) | 243 | 1.0 | 2.7 |
| DR663(DR232-DR217) | 929 | 4.0 | 10.4 |
| DR664(DR232-DR583) | 378 | 1.6 | 4.2 |
| DR665(DR232-DR584) | 137 | 0.6 | 1.5 |
| DR666(DR232-DR585) | 161 | 0.7 | 1.8 |
| DR667(DR232-DR586) | 979 | 4.2 | 10.9 |
| DR668(DR232-DR587) | 196 | 0.8 | 2.2 |
| DR669(DR232-DR588) | 194 | 0.8 | 2.2 |
| DR670(DR232-DR589) | 349 | 1.5 | 3.9 |
| DR671(DR232-DR590) | 1306 | 5.6 | 14.6 |
| DR672(DR233-DR214) | 1188 | 5.1 | 13.3 |
| DR673(DR233-DR217) | 2153 | 9.3 | 24.0 |
| DR674(DR233-DR583) | 2296 | 9.9 | 25.6 |
| DR675(DR233-DR584) | 4191 | 18.1 | 46.8 |
| DR676(DR233-DR584) | 241 | 1.0 | 2.7 |
| DR677(DR233-DR586) | 686 | 3.0 | 7.7 |
| DR678(DR233-DR587) | 5977 | 25.8 | 66.7 |
| DR679(DR233-DR588) | 4357 | 18.8 | 48.6 |
| DR680(DR233-DR589) | 3008 | 13.0 | 33.6 |
| DR681(DR233-DR590) | 411 | 1.8 | 4.6 |
| DR682(DR234-DR214) | 840 | 3.6 | 9.4 |
| DR683(DR234-DR217) | 332 | 1.4 | 3.7 |
| DR684(DR234-DR583) | 166 | 0.7 | 1.9 |
| DR685(DR234-DR584) | 672 | 2.9 | 7.5 |
| DR686(DR234-DR585) | 277 | 1.2 | 3.1 |
| DR687(DR234-DR586) | 230 | 1.0 | 2.6 |
| DR688(DR234-DR587) | 1705 | 7.3 | 19.0 |
| DR689(DR234-DR588) | 933 | 4.0 | 10.4 |
| DR690(DR234-DR589) | 565 | 2.4 | 6.3 |
| DR691(DR234-DR590) | 159 | 0.7 | 1.8 |
| DR692(DR214-DR229) | 283 | 1.2 | 3.2 |
| DR693(DR214-DR230) | 202 | 0.9 | 2.3 |
| DR694(DR214-DR231) | 133 | 0.6 | 1.5 |
| DR695(DR214-DR232) | 184 | 0.8 | 2.1 |
| DR696(DR214-DR233) | 310 | 1.3 | 3.5 |
| DR697(DR214-DR234) | 217 | 0.9 | 2.4 |
| DR698(DR217-DR229) | 172 | 0.7 | 1.9 |
| DR699(DR217-DR230) | 232 | 1.0 | 2.6 |
| DR700(DR217-DR231) | 210 | 0.9 | 2.4 |
| DR701(DR217-DR232) | 2879 | 12.4 | 32.1 |
| DR702(DR217-DR233) | 208 | 0.9 | 2.3 |
| DR703(DR217-DR234) | 291 | 1.3 | 3.2 |
| DR704(DR583-DR229) | 192 | 0.8 | 2.1 |
| DR705(DR583-DR230) | 199 | 0.9 | 2.2 |
| DR706(DR583-DR231) | 265 | 1.1 | 3.0 |
| DR707(DR583-DR232) | 255 | 1.1 | 2.8 |
| DR708(DR583-DR233) | 166 | 0.7 | 1.9 |
| DR709(DR583-DR234) | 168 | 0.7 | 1.9 |
| DR710(DR584-DR229) | 231 | 1.0 | 2.6 |
| DR711(DR584-DR230) | 231 | 1.0 | 2.6 |
| DR712(DR584-DR231) | 160 | 0.7 | 1.8 |
| DR713(DR584-DR232) | 164 | 0.7 | 1.8 |
| DR714(DR584-DR233) | 154 | 0.7 | 1.7 |
| DR715(DR584-DR234) | 228 | 1.0 | 2.5 |
| DR716(DR585-DR229) | 2271 | 9.8 | 25.4 |
| DR717(DR585-DR230) | 2292 | 9.9 | 25.6 |
| DR718(DR585-DR231) | 7211 | 31.1 | 80.5 |
| DR719(DR585-DR232) | 1674 | 7.2 | 18.7 |
| DR720(DR585-DR233) | 1251 | 5.4 | 14.0 |
| DR721(DR585-DR234) | 4122 | 17.8 | 46.0 |
| DR722(DR586-DR229) | 4087 | 17.6 | 45.6 |
| DR723(DR586-DR230) | 468 | 2.0 | 5.2 |
| DR724(DR586-DR231) | 4012 | 17.3 | 44.8 |
| DR725(DR586-DR232) | 210 | 0.9 | 2.4 |
| DR726(DR586-DR233) | 227 | 1.0 | 2.5 |
| DR727(DR586-DR234) | 211 | 0.9 | 2.4 |
| DR728(DR587-DR229) | 251 | 1.1 | 2.8 |
| DR729(DR587-DR230) | 226 | 1.0 | 2.5 |
| DR730(DR587-DR231) | 203 | 0.9 | 2.3 |
| DR731(DR587-DR232) | 206 | 0.9 | 2.3 |
| DR732(DR587-DR233) | 390 | 1.7 | 4.3 |
| DR733(DR587-DR234) | 294 | 1.3 | 3.3 |
| DR734(DR588-DR229) | 676 | 2.9 | 7.5 |
| DR735(DR588-DR230) | 856 | 3.7 | 9.6 |
| DR736(DR588-DR231) | 1810 | 7.8 | 20.2 |
| DR737(DR588-DR232) | 545 | 2.3 | 6.1 |
| DR738(DR588-DR233) | 218 | 0.9 | 2.4 |
| DR739(DR588-DR234) | 710 | 3.1 | 7.9 |
| DR740(DR589-DR229) | 613 | 2.6 | 6.8 |
| DR741(DR589-DR230) | 593 | 2.6 | 6.6 |
| DR742(DR589-DR231) | 297 | 1.3 | 3.3 |
| DR743(DR589-DR232) | 166 | 0.7 | 1.9 |
| DR744(DR589-DR233) | 622 | 2.7 | 6.9 |
| DR745(DR589-DR234) | 283 | 1.2 | 3.2 |
| DR746(DR590-DR229) | 577 | 2.5 | 6.4 |
| DR747(DR590-DR230) | 1905 | 8.2 | 21.3 |
| DR748(DR590-DR231) | 962 | 4.1 | 10.7 |
| DR749(DR590-DR232) | 366 | 1.6 | 4.1 |
| DR750(DR590-DR233) | 275 | 1.2 | 3.1 |
| DR751(DR590-DR234) | 220 | 0.9 | 2.5 |
| medium | 232 | 1.0 | 2.6 |
| IL2 | 8956 | 38.6 | 100.0 |

[0585] In addition, EC50 values for proliferation and IFNγ production were determined for 36 Anti-IL2Rβ/γ V_{H}H²'s. Purified CD8 positive T cell blasts from 2 different donors were resuspended at 2 million cells/mL in PBS. Anti-IL2Rβ/γ V_{H}H²'s or human IL-2 were titrated into 96-well plates (Falcon) starting at 200 nM in 75 μl DPBS and 6 times 10 fold diluted. 100 thousand CD8 positive T cells were added per well in 75 μl DPBS. Controls included wells without anti-IL2Rβ/γ V_{H}H²'s or human IL-2 (media). Plates were transferred to a humidified incubator (ThermoFisher) and incubated at 37 degrees centigrade, 5 percent carbon dioxide for 72 hours and proliferation and IFNγ production measured as above.

[0586] To determine the EC50 of each anti-IL2Rβ/γ V_{H}H²'s variant upon proliferation and IFNγ production, IFNγ MSD and Celltiterglo luminescence signal values for cells treated with anti-IL2Rβ/γ V_{H}H²'s and human IL-2 were analyzed by 4 parameter Nonlinear Regression on log transformed concentration values using Prism GraphPad software. Emax values were compared to those obtained for control cells treated with growth medium alone to yield a fold induction. The data from these experiments is presented in Table 19 and Table 20.

[0587] In this assay anti-IL2Rβ/γ V_{H}H²'s induced STAT5 proliferation and IFNγ production by human CD8 positive T cell blasts at distinct EC50 values and Emax values, and relative potency was conserved between donors.

TABLE 19
Proliferation and IFNg production induced by anti-IL2Rβ/γ
V_{H}H² on Primary CD8 T cell Blasts

| | EC50 | | EC50 IFNg | |
|---|---|---|---|---|
| anti-IL2Rβ/γ V_{H}H² | Proliferation (pM) | | Production (pM) | |
| Construct | D12 | D16 | D12 | D16 |
| DR634(DR229-DR583) | 24 | 16 | 218 | 258 |
| DR635(DR229-DR584) | 39 | 73 | 1307 | 1239 |
| DR636(DR229-DR585) | 30299 | 13232 | 32580 | 176915 |
| DR638(DR229-DR587) | 15 | 24 | 232 | 365 |
| DR639(DR229-DR588) | 28 | 42 | 923 | 1143 |
| DR642(DR230-DR214) | 133 | 635 | 8004 | 13352 |
| DR643(DR230-DR217) | 8199 | 12706 | 197350 | 1142790 |
| DR644(DR230-DR583) | 12 | 494 | 110 | 1520 |
| DR645(DR230-DR584) | 41 | 154 | 503 | 1139 |
| DR648(DR230-DR587) | 23 | 49880 | 158 | 803794594 |
| DR652(DR231-DR214) | 657 | 388351 | 3137 | 636759161 |
| DR655(DR231-DR584) | NA | NA | 20241 | NA |
| DR656(DR231-DR585) | 9879 | 0 | 91914 | NA |
| DR671(DR232-DR590) | 20 | 2 | NA | NA |
| DR674(DR233-DR583) | 73 | 110 | 1680 | 764 |
| DR675(DR233-DR584) | 661 | 1027 | 6289 | 4111 |
| DR676(DR233-DR584) | 12748 | 28357 | 486445 | 55151 |
| DR678(DR233-DR587) | 425 | 1026 | 2424 | 1645 |
| DR679(DR233-DR588) | 191 | 1090 | 39053 | 15137 |
| DR680(DR233-DR589) | 49429 | NA | 2436507 | 534395 |
| DR681(DR233-DR590) | 5489 | 36 | NA | NA |
| DR682(DR234-DR214) | 4238 | 2181 | 14903 | 13002 |
| DR688(DR234-DR587) | 111 | 67 | 3157 | 197 |
| DR696(DR214-DR233) | 28968 | 33600 | 53221 | 43286 |
| DR714(DR584-DR233) | NA | 391738 | 767789054 | 704782797 |
| DR716(DR585-DR229) | 1216 | 6327 | 73363 | 22072 |
| DR717(DR585-DR230) | 146 | 156 | 1059 | 947 |
| DR718(DR585-DR231) | 900 | 881 | 2704 | 2907 |
| DR719(DR585-DR232) | 1091 | 2132 | 45349 | 49478 |
| DR720(DR585-DR233) | 10823 | 14194 | 116492 | 42782 |
| DR721(DR585-DR234) | 115 | 161 | 979 | 1708 |
| DR736(DR588-DR231) | 182 | 279 | 3935 | 9028 |
| DR740(DR589-DR229) | NA | 315755 | 791018218 | 500648091 |
| DR741(DR589-DR230) | NA | 48169 | 718953614 | 123207 |
| DR744(DR589-DR233) | NA | 75757 | 598388843 | 198121846 |
| DR747(DR590-DR230) | 12 | 141 | 466 | 679 |
| IL-2 | 130 | 142 | 447 | 357 |

NA: Not Available.
D12: Donor 12.
D16: Donor 16.

TABLE 20
Proliferation and IFNg production induced by anti-IL2Rβ/γ
V_{H}H² on Primary CD8 T cell Blasts

| | Emax Proliferation | | Emax IFNg Production | |
|---|---|---|---|---|
| anti-IL2Rβ/γ V_{H}H² | (Fold over media control) | | (Fold over media control) | |
| Construct | D12 | D16 | D12 | D16 |
| DR634(DR229-DR583) | 8.6 | 11.9 | 104 | 114 |
| DR635(DR229-DR584) | 10.6 | 19.5 | 187 | 318 |
| DR636(DR229-DR585) | 3.6 | 6.3 | 16 | 20 |
| DR638(DR229-DR587) | 13.3 | 26.7 | 275 | 441 |
| DR639(DR229-DR588) | 8.9 | 16.2 | 109 | 194 |
| DR642(DR230-DR214) | 9.6 | 22.8 | 186 | 336 |
| DR643(DR230-DR217) | 6.8 | 13.0 | 57 | 81 |
| DR644(DR230-DR583) | 4.1 | 10.0 | 17 | 22 |
| DR645(DR230-DR584) | 7.5 | 25.0 | 222 | 361 |
| DR648(DR230-DR587) | 13.5 | 29.0 | 256 | 237 |
| DR652(DR231-DR214) | 13.8 | 10.6 | 242 | 17 |
| DR655(DR231-DR584) | 1.0 | 1.1 | 1 | 1 |
| DR656(DR231-DR585) | 7.1 | 1.7 | 39 | 3 |
| DR671(DR232-DR590) | 1.9 | 0.9 | 2 | 1 |
| DR674(DR233-DR583) | 5.8 | 12.2 | 63 | 73 |
| DR675(DR233-DR584) | 5.7 | 19.8 | 162 | 243 |
| DR676(DR233-DR584) | 3.0 | 9.4 | 29 | 19 |
| DR678(DR233-DR587) | 9.4 | 26.1 | 250 | 285 |
| DR679(DR233-DR588) | 3.7 | 12.0 | 79 | 91 |
| DR680(DR233-DR589) | 3.8 | 9.7 | 15 | 21 |
| DR681(DR233-DR590) | 0.9 | 1.3 | 1 | 1 |
| DR682(DR234-DR214) | 3.5 | 7.3 | 15 | 19 |
| DR688(DR234-DR587) | 4.6 | 10.9 | 53 | 38 |
| DR696(DR214-DR233) | 2.0 | 3.6 | 5 | 4 |
| DR714(DR584-DR233) | 4.1 | 8.0 | 22 | 11 |
| DR716(DR585-DR229) | 3.8 | 12.7 | 99 | 104 |
| DR717(DR585-DR230) | 6.9 | 12.8 | 86 | 62 |
| DR718(DR585-DR231) | 8.5 | 18.3 | 213 | 255 |
| DR719(DR585-DR232) | 5.4 | 12.0 | 123 | 143 |
| DR720(DR585-DR233) | 4.8 | 7.7 | 40 | 28 |
| DR721(DR585-DR234) | 6.8 | 18.7 | 180 | 277 |
| DR736(DR588-DR231) | 3.6 | 10.6 | 106 | 106 |
| DR740(DR589-DR229) | 3.2 | 3.6 | 8 | 4 |
| DR741(DR589-DR230) | 3.8 | 5.3 | 20 | 9 |
| DR744(DR589-DR233) | 1.9 | 2.4 | 5 | 4 |
| DR747(DR590-DR230) | 4.9 | 10.3 | 43 | 39 |
| IL-2 | 12 | 27 | 315 | 472 |

NA: Not Available.
D12: Donor 12.
D16: Donor 16.

### Example 14—Evaluation of Activity of anti-IL2Rβ/γ V_{H}H²s On CD4 positive T cell Clone 3F8

[0588] The anti-IL2Rβ/γ V_{H}H²s were evaluated for activity in CD4 positive human T cell clone 3F8 cells. The CD4 positive T cell clone 3F8 was generated by activation of PBMC of a healthy donor with the EBV transformed B cell line JY in two successive rounds of Mixed Leukocyte Reactions followed by single cell cloning by limited dilution as described (Yssel and Spits (2002) Current Protocols in Immunology 7.19.1-7.19.12). The CD4 positive T cell clone 3F8 expresses CD25 and CD122 and proliferates in response to IL2.

[0589] 3F8 cells were contacted with purified anti-IL2Rβ/γ V_{H}H²s as follows: Cells were grown in growth medium consisting of Yssel's medium (Iscove's modified Dulbecco's Medium (ThermoFisher), 0.25% w/v percent human albumin (Sigma), 1 percent penicillin/streptomycin (ThermoFisher), 1 percent ITS-X Insulin, Transferrin, Selenium (Gibco), 30 mg/L Tansferrin (Roche), 2 mg/L Palmitic Acid (Sigma), 1 percent LA-OA-Albumin Linoleic Acid, Oleic Acid (Sigma), 1 percent human serum (Gemini) (Yssel et al (1984) J Immunol Methods 72: 219-227) at 0.2 million cells per ml with 50 Gy irradiated JY cells at 0.1 million cells per well and 40 Gy irradiated allogeneic PBMC at 1 million cells per mL. After six days of culture and expansion with human IL2 at 100 pM, cells were washed and seeded into black, clear bottom 96 well plates (Costar) at 50 thousand cells per well in 50 μl growth medium. Anti-IL2Rβ/γ V_{H}H²s were diluted into 96-well plates (Falcon) at 30 nM in 50 μl growth medium without IL2 and added to the wells. Controls included wells without anti-IL2Rβ/γ V_{H}H²s or human IL2 (media) and wells with human IL2 at a final concentration of 100 pM. Plates were transferred to a humidified incubator (ThermoFisher) and incubated at 37 degrees centigrade, 5 percent carbon dioxide for 72 hrs.

[0590] Plates were removed from the incubator and cells were lysed by adding 100 μl per well of Celltiterglo™ (CTG) (Promega) according to manufacturer's instructions. Cell lysates were mixed on an orbital shaker (VWR Scientific) for 10 minutes at 300 rpm. Luminescence was read as counts per second on an Envision 2103 Multilabel Plate Reader (Perkin Elmer) using the ATPLite protocol.

[0591] To compare the effect of each anti-IL2Rβ/γ V_{H}H²s variant upon proliferation, CTG luminescence signal values for cells treated with anti-IL2Rβ/γ V_{H}H²s were compared to those obtained for control cells treated with growth medium alone to yield a fold induction and with control cells treated with human IL2 to yield an activity relative to the response to IL2 as a percentage. The data from these experiments is presented in Table 21.

[0592] In this assay 87/120 anti-IL2Rβ/γ V_{H}H²s induced 3F8 cell proliferation at distinct levels (>1 fold), but not above levels observed with IL2 at 100 pM.

TABLE 21
Induction of proliferation by anti-IL2Rβ/γ
V_{H}H² on 3F8 T Cell Clone

| | 3F8 | Relative | Relative |
|---|---|---|---|
| | proliferation | Proliferation | Proliferation |
| | Induction | Induction | Induction |
| Anti-IL2Rβ/γ V_{H}H² | CTG | (fold | (% hIL2 |
| Construct | (cpm) | induction) | response) |
| DR632(DR229-DR214) | 33888 | 0.8 | 36.9 |
| DR633(DR229-DR217) | 41194 | 1.0 | 44.8 |
| DR634(DR229-DR583) | 66462 | 1.6 | 72.4 |
| DR635(DR229-DR584) | 76938 | 1.9 | 83.8 |
| DR636(DR229-DR585) | 44314 | 1.1 | 48.2 |
| DR637(DR229-DR586) | 46870 | 1.1 | 51.0 |
| DR638(DR229-DR587) | 87848 | 2.1 | 95.6 |
| DR639(DR229-DR587) | 71832 | 1.7 | 78.2 |
| DR640(DR229-DR589) | 64522 | 1.6 | 70.2 |
| DR641(DR229-DR590) | 43324 | 1.0 | 47.2 |
| DR642(DR230-DR214) | 84204 | 2.0 | 91.7 |
| DR643(DR230-DR217) | 79866 | 1.9 | 86.9 |
| DR644(DR230-DR583) | 57066 | 1.4 | 62.1 |
| DR645(DR230-DR584) | 72772 | 1.8 | 79.2 |
| DR646(DR230-DR585) | 47376 | 1.1 | 51.6 |
| DR647(DR230-DR586) | 73828 | 1.8 | 80.4 |
| DR648(DR230-DR587) | 72194 | 1.7 | 78.6 |
| DR649(DR230-DR588) | 48562 | 1.2 | 52.9 |
| DR650(DR230-DR589) | 45092 | 1.1 | 49.1 |
| DR651(DR230-DR590) | 41826 | 1.0 | 45.5 |
| DR652(DR231-DR214) | 71060 | 1.7 | 77.4 |
| DR653(DR231-DR217) | 31888 | 0.8 | 34.7 |
| DR654(DR231-DR583) | 37502 | 0.9 | 40.8 |
| DR655(DR231-DR584) | 41534 | 1.0 | 45.2 |
| DR656(DR231-DR585) | 78076 | 1.9 | 85.0 |
| DR657(DR231-DR586) | 53584 | 1.3 | 58.3 |
| DR658(DR231-DR587) | 40568 | 1.0 | 44.2 |
| DR659(DR231-DR588) | 52996 | 1.3 | 57.7 |
| DR660(DR231-DR589) | 41636 | 1.0 | 45.3 |
| DR661(DR231-DR590) | 41330 | 1.0 | 45.0 |
| DR662(DR232-DR214) | 49936 | 1.2 | 54.4 |
| DR663(DR232-DR217) | 71038 | 1.7 | 77.3 |
| DR664(DR232-DR583) | 69286 | 1.7 | 75.4 |
| DR665(DR232-DR584) | 41762 | 1.0 | 45.5 |
| DR666(DR232-DR585) | 50210 | 1.2 | 54.7 |
| DR667(DR232-DR586) | 74854 | 1.8 | 81.5 |
| DR668(DR232-DR587) | 51260 | 1.2 | 55.8 |
| DR669(DR232-DR588) | 52574 | 1.3 | 57.2 |
| DR670(DR232-DR589) | 62090 | 1.5 | 67.6 |
| DR671(DR232-DR590) | 71850 | 1.7 | 78.2 |
| DR672(DR233-DR214) | 63810 | 1.5 | 69.5 |
| DR673(DR233-DR217) | 66648 | 1.6 | 72.6 |
| DR674(DR233-DR583) | 78250 | 1.9 | 85.2 |
| DR675(DR233-DR584) | 79716 | 1.9 | 86.8 |
| DR676(DR233-DR584) | 47408 | 1.1 | 51.6 |
| DR677(DR233-DR586) | 60714 | 1.5 | 66.1 |
| DR678(DR233-DR587) | 84816 | 2.1 | 92.3 |
| DR679(DR233-DR588) | 70776 | 1.7 | 77.1 |
| DR680(DR233-DR589) | 72106 | 1.7 | 78.5 |
| DR681(DR233-DR590) | 71270 | 1.7 | 77.6 |
| DR682(DR234-DR214) | 59464 | 1.4 | 64.7 |
| DR683(DR234-DR217) | 62038 | 1.5 | 67.5 |
| DR684(DR234-DR583) | 40188 | 1.0 | 43.8 |
| DR685(DR234-DR584) | 62736 | 1.5 | 68.3 |
| DR686(DR234-DR585) | 48414 | 1.2 | 52.7 |
| DR687(DR234-DR586) | 59830 | 1.4 | 65.1 |
| DR688(DR234-DR587) | 71834 | 1.7 | 78.2 |
| DR689(DR234-DR588) | 75204 | 1.8 | 81.9 |
| DR690(DR234-DR589) | 75612 | 1.8 | 82.3 |
| DR691(DR234-DR590) | 48538 | 1.2 | 52.8 |
| DR692(DR214-DR229) | 52982 | 1.3 | 57.7 |
| DR693(DR214-DR230) | 57408 | 1.4 | 62.5 |
| DR694(DR214-DR231) | 41318 | 1.0 | 45.0 |
| DR695(DR214-DR232) | 63280 | 1.5 | 68.9 |
| DR696(DR214-DR233) | 59748 | 1.4 | 65.0 |
| DR697(DR214-DR234) | 50344 | 1.2 | 54.8 |
| DR698(DR217-DR229) | 46812 | 1.1 | 51.0 |
| DR699(DR217-DR230) | 55404 | 1.3 | 60.3 |
| DR700(DR217-DR231) | 47242 | 1.1 | 51.4 |
| DR701(DR217-DR232) | 62282 | 1.5 | 67.8 |
| DR702(DR217-DR233) | 62942 | 1.5 | 68.5 |
| DR703(DR217-DR234) | 58558 | 1.4 | 63.7 |
| DR704(DR583-DR229) | 36402 | 0.9 | 39.6 |
| DR705(DR583-DR230) | 41940 | 1.0 | 45.7 |
| DR706(DR583-DR231) | 36666 | 0.9 | 39.9 |
| DR707(DR583-DR232) | 38206 | 0.9 | 41.6 |
| DR708(DR583-DR233) | 32604 | 0.8 | 35.5 |
| DR709(DR583-DR234) | 37410 | 0.9 | 40.7 |
| DR710(DR584-DR229) | 35512 | 0.9 | 38.7 |
| DR711(DR584-DR230) | 37716 | 0.9 | 41.1 |
| DR712(DR584-DR231) | 37102 | 0.9 | 40.4 |
| DR713(DR584-DR232) | 40972 | 1.0 | 44.6 |
| DR714(DR584-DR233) | 27114 | 0.7 | 29.5 |
| DR715(DR584-DR234) | 39740 | 1.0 | 43.3 |
| DR716(DR585-DR229) | 81372 | 2.0 | 88.6 |
| DR717(DR585-DR230) | 72588 | 1.8 | 79.0 |
| DR718(DR585-DR231) | 80658 | 2.0 | 87.8 |
| DR719(DR585-DR232) | 70762 | 1.7 | 77.0 |
| DR720(DR585-DR233) | 88944 | 2.2 | 96.8 |
| DR721(DR585-DR234) | 72802 | 1.8 | 79.3 |
| DR722(DR586-DR229) | 74538 | 1.8 | 81.1 |
| DR723(DR586-DR230) | 50868 | 1.2 | 55.4 |
| DR724(DR586-DR231) | 70232 | 1.7 | 76.5 |
| DR725(DR586-DR232) | 54800 | 1.3 | 59.7 |
| DR726(DR586-DR233) | 35400 | 0.9 | 38.5 |
| DR727(DR586-DR234) | 40006 | 1.0 | 43.6 |
| DR728(DR587-DR229) | 35520 | 0.9 | 38.7 |
| DR729(DR587-DR230) | 52430 | 1.3 | 57.1 |
| DR730(DR587-DR231) | 34202 | 0.8 | 37.2 |
| DR731(DR587-DR232) | 42902 | 1.0 | 46.7 |
| DR732(DR587-DR233) | 44550 | 1.1 | 48.5 |
| DR733(DR587-DR234) | 49704 | 1.2 | 54.1 |
| DR734(DR588-DR229) | 38080 | 0.9 | 41.5 |
| DR735(DR588-DR230) | 55892 | 1.4 | 60.8 |
| DR736(DR588-DR231) | 87242 | 2.1 | 95.0 |
| DR737(DR588-DR232) | 65336 | 1.6 | 71.1 |
| DR738(DR588-DR233) | 40950 | 1.0 | 44.6 |
| DR739(DR588-DR234) | 59136 | 1.4 | 64.4 |
| DR740(DR589-DR229) | 75534 | 1.8 | 82.2 |
| DR741(DR589-DR230) | 89468 | 2.2 | 97.4 |
| DR742(DR589-DR231) | 48714 | 1.2 | 53.0 |
| DR743(DR589-DR232) | 45886 | 1.1 | 50.0 |
| DR744(DR589-DR233) | 67692 | 1.6 | 73.7 |
| DR745(DR589-DR234) | 49226 | 1.2 | 53.6 |
| DR746(DR590-DR229) | 44046 | 1.1 | 48.0 |
| DR747(DR590-DR230) | 66262 | 1.6 | 72.1 |
| DR748(DR590-DR231) | 90162 | 2.2 | 98.2 |
| DR749(DR590-DR232) | 75762 | 1.8 | 82.5 |
| DR750(DR590-DR233) | 46084 | 1.1 | 50.2 |
| DR751(DR590-DR234) | 36334 | 0.9 | 39.6 |
| medium | 41308 | 1.0 | 45.0 |
| IL2 | 91857 | 2.2 | 100.0 |

### Example 15—Evaluation of Activity of anti-IL2Rβ/γ V_{H}H²s On CD8 positive T cell Clone 5B9

[0593] The anti-IL2Rβ/γ V_{H}H²s were evaluated for activity in CD8 positive human T cell clone 3F8 cells. The CD8 positive T cell clone 5B9 was generated by activation of PBMC of a healthy donor with the EBV transformed B cell line JY in two successive rounds of Mixed Leukocyte Reactions followed by single cell cloning by limited dilution as described (Yssel and Spits (2002) Current Protocols in Immunology 7.19.1-7.19.12). The CD8 positive T cell clone 5B9 expresses CD25 and CD122 and proliferates and phosphorylated STAT5 in response to IL2.

[0594] 5B9 cells were contacted with purified anti-IL2Rβ/γ V_{H}H²s as follows: Cells were grown in growth medium consisting of Yssel's medium (Iscove's modified Dulbecco's Medium (ThermoFisher), 0.25% w/v percent human albumin (Sigma), 1 percent penicillin/streptomycin (ThermoFisher), 1 percent ITS-X Insulin, Transferrin, Selenium (Gibco), 30 mg/L Tansferrin (Roche), 2 mg/L Palmitic Acid (Sigma), 1 percent LA-OA-Albumin Linoleic Acid, Oleic Acid (Sigma), 1 percent human serum (Gemini) (Yssel et al (1984) J Immunol Methods 72: 219-227) at 0.2 million cells per ml with 50 Gy irradiated JY cells at 0.1 million cells per well and 40 Gy irradiated allogeneic PBMC at 1 million cells per mL. After twelve days of culture and expansion with human IL2 at 100 pM, 5B9 cells were centrifuged and washed in DPBS twice. Cells were resuspended at 2 million cells/mL in PBS. Anti-IL2Rβ/γ V_{H}H²s were diluted into 96-well plates (Falcon) to 30 nM in 50 μl DPBS and 100 thousand activated 5B9 cells were added per well in 50 μl DPBS. Controls included wells without anti-IL2Rβ/γ V_{H}H²s or human IL2 (media) and wells with human IL2 at a final concentration of 100 pM. Plates were transferred to a humidified incubator (ThermoFisher) and incubated at 37 degrees centigrade, 5 percent carbon dioxide for 20 min.

[0595] Plates were removed from the incubator and cells were lysed by adding 100 μl per well of Tris Lysis buffer supplemented with Protease Inhibitor Solution, Phosphatase Inhibitor I and Phosphatase Inhibitor II from MSD Multispot Assay System Phospho-STAT Panel Kit (MSD K15202D) according to manufacturer's instructions. Plates were incubated on ice for 15 minutes and centrifuged at 600×g for 6 minutes. Cell lysates were transferred to a new 96 well plate.

[0596] Induction of STAT5 phosphorylation was measured in the cell lysates using the MSD Multispot Assay System Phospho-STAT Panel (MSD K15202D) according to manufacturer's instructions. Briefly, mAb precoated MSD Phospho-STAT panel assay plates were incubated with 150 μL per well Blocker A in Tris Wash Buffer at 30 mg/mL for 60 min on an orbital shaker (VWR Scientific) at 300 rpm at room temperature. Plates were washed 3 times with Tris Wash Buffer and 30 μL Cell lysates were added per well. Plates were incubated for 60 min on an orbital shaker (VWR Scientific) at 300 rpm at room temperature. Plates were washed 3 times with Tris Wash Buffer and 25 μL 1×detection antibody in 10 mg/mL Blocker A in Tris Wash Buffer was added to each well. Plates were incubated for 60 min on an orbital shaker (VWR Scientific) at 300 rpm at room temperature. Plates were washed 3 times with Tris Wash Buffer and 150 μL 1× Read Buffer T was added to each well and Luminescence signal was read on a Mesoscale Quickplex SQ 120 instrument

[0597] To compare the effect of each anti-IL2Rβ/γ V_{H}H²s variant upon CD8 positive T cell clone 5B9 STAT5 phosphorylation, MSD luminescence signal values for cells treated with anti-IL2Rβ/γ V_{H}H²s were compared to those obtained for control cells treated with growth medium alone to yield a fold induction and with control cells treated with human IL2 to yield an activity relative to the response to IL2 as a percentage. The data from these experiments is presented in Table 22.

[0598] In this assay 9/120 anti-IL2Rβ/γ V_{H}H²s induced STAT5 phosphorylation in CD8 positive T cell clone 5B9 at distinct levels (Fold>1), but not above levels observed with IL2 at 100 pM.

TABLE 22
pSTAT5 Induction by anti-IL2Rβ/γ
V_{H}H² on CD8 T cell clone 5B9

| | 5B9 | Relative | Relative |
|---|---|---|---|
| | pSTAT5 | pSTAT5 | pSTAT5 |
| | Induction | Induction | Induction |
| Anti-IL2Rβ/γ V_{H}H² | (MSD | (fold | (% hIL2 |
| Construct | Signal) | induction) | response) |
| DR632(DR229-DR214) | 1269 | 0.4 | 13.9 |
| DR633(DR229-DR217) | 1218 | 0.4 | 13.3 |
| DR634(DR229-DR583) | 1752 | 0.6 | 19.1 |
| DR635(DR229-DR584) | 1897 | 0.6 | 20.7 |
| DR636(DR229-DR585) | 1304 | 0.4 | 14.2 |
| DR637(DR229-DR586) | 1136 | 0.4 | 12.4 |
| DR638(DR229-DR587) | 1633 | 0.5 | 17.8 |
| DR639(DR229-DR587) | 1780 | 0.6 | 19.4 |
| DR640(DR229-DR589) | 1227 | 0.4 | 13.4 |
| DR641(DR229-DR590) | 1089 | 0.4 | 11.9 |
| DR642(DR230-DR214) | 1785 | 0.6 | 19.5 |
| DR643(DR230-DR217) | 1647 | 0.5 | 18.0 |
| DR644(DR230-DR583) | 1137 | 0.4 | 12.4 |
| DR645(DR230-DR584) | 1244 | 0.4 | 13.6 |
| DR646(DR230-DR585) | 1580 | 0.5 | 17.3 |
| DR647(DR230-DR586) | 1601 | 0.5 | 17.5 |
| DR648(DR230-DR587) | 1280 | 0.4 | 14.0 |
| DR649(DR230-DR588) | 1161 | 0.4 | 12.7 |
| DR650(DR230-DR589) | 1546 | 0.5 | 16.9 |
| DR651(DR230-DR590) | 1343 | 0.4 | 14.7 |
| DR652(DR231-DR214) | 1238 | 0.4 | 13.5 |
| DR653(DR231-DR217) | 1192 | 0.4 | 13.0 |
| DR654(DR231-DR583) | 1534 | 0.5 | 16.8 |
| DR655(DR231-DR584) | 1543 | 0.5 | 16.9 |
| DR656(DR231-DR585) | 2108 | 0.7 | 23.0 |
| DR657(DR231-DR586) | 1958 | 0.6 | 21.4 |
| DR658(DR231-DR587) | 2853 | 0.9 | 31.2 |
| DR659(DR231-DR588) | 2750 | 0.9 | 30.0 |
| DR660(DR231-DR589) | 2149 | 0.7 | 23.5 |
| DR661(DR231-DR590) | 1964 | 0.6 | 21.4 |
| DR662(DR232-DR214) | 2965 | 1.0 | 32.4 |
| DR663(DR232-DR217) | 2800 | 0.9 | 30.6 |
| DR664(DR232-DR583) | 2176 | 0.7 | 23.8 |
| DR665(DR232-DR584) | 1956 | 0.6 | 21.4 |
| DR666(DR232-DR585) | 3292 | 1.1 | 36.0 |
| DR667(DR232-DR586) | 2493 | 0.8 | 27.2 |
| DR668(DR232-DR587) | 1963 | 0.6 | 21.4 |
| DR669(DR232-DR588) | 1630 | 0.5 | 17.8 |
| DR670(DR232-DR589) | 3099 | 1.0 | 33.8 |
| DR671(DR232-DR590) | 2864 | 0.9 | 31.3 |
| DR672(DR233-DR214) | 1851 | 0.6 | 20.2 |
| DR673(DR233-DR217) | 2285 | 0.7 | 25.0 |
| DR674(DR233-DR583) | 4006 | 1.3 | 43.7 |
| DR675(DR233-DR584) | 3299 | 1.1 | 36.0 |
| DR676(DR233-DR584) | 2050 | 0.7 | 22.4 |
| DR677(DR233-DR586) | 2085 | 0.7 | 22.8 |
| DR678(DR233-DR587) | 5875 | 1.9 | 64.2 |
| DR679(DR233-DR588) | 3141 | 1.0 | 34.3 |
| DR680(DR233-DR589) | 2088 | 0.7 | 22.8 |
| DR681(DR233-DR590) | 2923 | 1.0 | 31.9 |
| DR682(DR234-DR214) | 1090 | 0.4 | 11.9 |
| DR683(DR234-DR217) | 1064 | 0.3 | 11.6 |
| DR684(DR234-DR583) | 2148 | 0.7 | 23.5 |
| DR685(DR234-DR584) | 2720 | 0.9 | 29.7 |
| DR686(DR234-DR585) | 1114 | 0.4 | 12.2 |
| DR687(DR234-DR586) | 1138 | 0.4 | 12.4 |
| DR688(DR234-DR587) | 2837 | 0.9 | 31.0 |
| DR689(DR234-DR588) | 2317 | 0.8 | 25.3 |
| DR690(DR234-DR589) | 1118 | 0.4 | 12.2 |
| DR691(DR234-DR590) | 1087 | 0.4 | 11.9 |
| DR692(DR214-DR229) | 2156 | 0.7 | 23.5 |
| DR693(DR214-DR230) | 1988 | 0.6 | 21.7 |
| DR694(DR214-DR231) | 1060 | 0.3 | 11.6 |
| DR695(DR214-DR232) | 1162 | 0.4 | 12.7 |
| DR696(DR214-DR233) | 3354 | 1.1 | 36.6 |
| DR697(DR214-DR234) | 2683 | 0.9 | 29.3 |
| DR698(DR217-DR229) | 1114 | 0.4 | 12.2 |
| DR699(DR217-DR230) | 1092 | 0.4 | 11.9 |
| DR700(DR217-DR231) | 2454 | 0.8 | 26.8 |
| DR701(DR217-DR232) | 3240 | 1.1 | 35.4 |
| DR702(DR217-DR233) | 1074 | 0.4 | 11.7 |
| DR703(DR217-DR234) | 1257 | 0.4 | 13.7 |
| DR704(DR583-DR229) | 1258 | 0.4 | 13.7 |
| DR705(DR583-DR230) | 978 | 0.3 | 10.7 |
| DR706(DR583-DR231) | 1521 | 0.5 | 16.6 |
| DR707(DR583-DR232) | 1374 | 0.4 | 15.0 |
| DR708(DR583-DR233) | 1459 | 0.5 | 15.9 |
| DR709(DR583-DR234) | 947 | 0.3 | 10.3 |
| DR710(DR584-DR229) | 1506 | 0.5 | 16.4 |
| DR711(DR584-DR230) | 1287 | 0.4 | 14.1 |
| DR712(DR584-DR231) | 1136 | 0.4 | 12.4 |
| DR713(DR584-DR232) | 911 | 0.3 | 9.9 |
| DR714(DR584-DR233) | 1621 | 0.5 | 17.7 |
| DR715(DR584-DR234) | 1224 | 0.4 | 13.4 |
| DR716(DR585-DR229) | 1058 | 0.3 | 11.6 |
| DR717(DR585-DR230) | 831 | 0.3 | 9.1 |
| DR718(DR585-DR231) | 1529 | 0.5 | 16.7 |
| DR719(DR585-DR232) | 1097 | 0.4 | 12.0 |
| DR720(DR585-DR233) | 1228 | 0.4 | 13.4 |
| DR721(DR585-DR234) | 1002 | 0.3 | 10.9 |
| DR722(DR586-DR229) | 1765 | 0.6 | 19.3 |
| DR723(DR586-DR230) | 1034 | 0.3 | 11.3 |
| DR724(DR586-DR231) | 1044 | 0.3 | 11.4 |
| DR725(DR586-DR232) | 996 | 0.3 | 10.9 |
| DR726(DR586-DR233) | 1516 | 0.5 | 16.6 |
| DR727(DR586-DR234) | 1005 | 0.3 | 11.0 |
| DR728(DR587-DR229) | 2575 | 0.8 | 28.1 |
| DR729(DR587-DR230) | 3054 | 1.0 | 33.4 |
| DR730(DR587-DR231) | 3302 | 1.1 | 36.1 |
| DR731(DR587-DR232) | 5336 | 1.7 | 58.3 |
| DR732(DR587-DR233) | 2605 | 0.9 | 28.4 |
| DR733(DR587-DR234) | 2372 | 0.8 | 25.9 |
| DR734(DR588-DR229) | 3622 | 1.2 | 39.6 |
| DR735(DR588-DR230) | 3175 | 1.0 | 34.7 |
| DR736(DR588-DR231) | 3608 | 1.2 | 39.4 |
| DR737(DR588-DR232) | 2864 | 0.9 | 31.3 |
| DR738(DR588-DR233) | 3243 | 1.1 | 35.4 |
| DR739(DR588-DR234) | 3150 | 1.0 | 34.4 |
| DR740(DR589-DR229) | 2891 | 0.9 | 31.6 |
| DR741(DR589-DR230) | 2611 | 0.9 | 28.5 |
| DR742(DR589-DR231) | 3593 | 1.2 | 39.2 |
| DR743(DR589-DR232) | 3060 | 1.0 | 33.4 |
| DR744(DR589-DR233) | 2903 | 0.9 | 31.7 |
| DR745(DR589-DR234) | 2331 | 0.8 | 25.5 |
| DR746(DR590-DR229) | 2588 | 0.8 | 28.3 |
| DR747(DR590-DR230) | 2970 | 1.0 | 32.4 |
| DR748(DR590-DR231) | 2832 | 0.9 | 30.9 |
| DR749(DR590-DR232) | 2561 | 0.8 | 28.0 |
| DR750(DR590-DR233) | 3290 | 1.1 | 35.9 |
| DR751(DR590-DR234) | 2505 | 0.8 | 27.4 |
| medium | 3062 | 1.0 | 33.4 |
| IL2 | 9157 | 3.0 | 100.0 |

### Example 16—Evaluation of Proliferative Activity of Anti-IL2Rβ/γ V_{H}H²s On CTLL-2 Cells

[0599] The anti-IL2Rβ/γ V_{H}H²s were evaluated for activity in CTLL-2 cells (ATCC TIB-214). CTLL-2 is a murine IL2 dependent Leukemic cell line with T cell characteristics that expresses IL2Rβ and IL2Rγ chains and is able to proliferate in response to IL2 receptor signaling.

[0600] CTLL-2 cells were contacted with purified anti-IL2Rβ/γ V_{H}H²s as follows: Cells were cultured in medium consisting of RPM 1640 (ThermoFisher), 10 percent fetal bovine serum (ThermoFisher), 1 percent penicillin/streptomycin (ThermoFisher), 1 percent sodium pyruvate (ThermoFisher), 2-mercaptoethanol (Gibco) and 10% T-STIM (BD 354115) at densities between 0.2-1 million cells per ml. Prior to the experiment CTLL-2 cells were harvested, centrifuged and washed in DPBS twice. CTLL-2 cells were resuspended at 0.5 million cells/mL in growth medium without T-STIM. Anti-IL2Rβ/γ V_{H}H²s were diluted into 96-well plates (Falcon) at 30 nM in 50 μl growth medium without T-STIM and 25 thousand CTLL-2 cells in 50 μl growth medium without T-STIM were added per well. Controls included wells without anti-IL2Rβ/γ V_{H}H²s or human IL2 (media) and wells with human IL2 at a final concentration of 100 pM. Plates were transferred to a humidified incubator (ThermoFisher) and incubated at 37 degrees centigrade, 5 percent carbon dioxide for 48 hrs.

[0601] Plates were removed from the incubator and cells were lysed by adding 100 μl per well of Celltiterglo™ (CTG) (Promega) according to manufacturer's instructions. Cell lysates were mixed on an orbital shaker (VWR Scientific) for 10 minutes at 300 rpm. Luminescence was read as counts per second on an Envision 2103 Multilabel Plate Reader (Perkin Elmer) using the ATPLite protocol.

[0602] To compare the effect of each anti-IL2Rβ/γ V_{H}H²s variant upon proliferation, CTG luminescence signal values for cells treated with anti-IL2Rβ/γ V_{H}H²s were compared to those obtained for control cells treated with growth medium alone to yield a fold induction and with control cells treated with human IL2 to yield an activity relative to the response to IL2 as a percentage. The data from these experiments is presented in Table 23.

[0603] In this assay none of the anti-human-IL2Rβ/γ V_{H}H²s induced CTLL-2 cell proliferation indicating that anti-IL2Rβ/γ V_{H}H²s did not activate murine cells.

TABLE 23
Induction of Proliferation by Anti-IL2Rβ/γ V_{H}H² on CTLL-2 Cells

| | CTLL-2 | Relative | Relative |
|---|---|---|---|
| | proliferation | Proliferation | Proliferation |
| | Induction | Induction | Induction |
| Anti-IL2Rβ/γ V_{H}H² | CTG | (fold | (% hIL2 |
| Construct | (cpm) | induction) | response) |
| DR632(DR229-DR214) | 5004 | 1.0 | 4.1 |
| DR633(DR229-DR217) | 5500 | 1.1 | 4.5 |
| DR634(DR229-DR583) | 5402 | 1.1 | 4.5 |
| DR635(DR229-DR584) | 4134 | 0.8 | 3.4 |
| DR636(DR229-DR585) | 4908 | 1.0 | 4.1 |
| DR637(DR229-DR586) | 4572 | 0.9 | 3.8 |
| DR638(DR229-DR587) | 4576 | 0.9 | 3.8 |
| DR639(DR229-DR587) | 5242 | 1.1 | 4.3 |
| DR640(DR229-DR589) | 4794 | 1.0 | 4.0 |
| DR641(DR229-DR590) | 4670 | 0.9 | 3.9 |
| DR642(DR230-DR214) | 4160 | 0.8 | 3.4 |
| DR643(DR230-DR217) | 4622 | 0.9 | 3.8 |
| DR644(DR230-DR583) | 4656 | 0.9 | 3.9 |
| DR645(DR230-DR584) | 5964 | 1.2 | 4.9 |
| DR646(DR230-DR585) | 4132 | 0.8 | 3.4 |
| DR647(DR230-DR586) | 4892 | 1.0 | 4.0 |
| DR648(DR230-DR587) | 4224 | 0.9 | 3.5 |
| DR649(DR230-DR588) | 4712 | 1.0 | 3.9 |
| DR650(DR230-DR589) | 3930 | 0.8 | 3.3 |
| DR651(DR230-DR590) | 4888 | 1.0 | 4.0 |
| DR652(DR231-DR214) | 4470 | 0.9 | 3.7 |
| DR653(DR231-DR217) | 4136 | 0.8 | 3.4 |
| DR654(DR231-DR583) | 4534 | 0.9 | 3.7 |
| DR655(DR231-DR584) | 4856 | 1.0 | 4.0 |
| DR656(DR231-DR585) | 4780 | 1.0 | 4.0 |
| DR657(DR231-DR586) | 3848 | 0.8 | 3.2 |
| DR658(DR231-DR587) | 5052 | 1.0 | 4.2 |
| DR659(DR231-DR588) | 3596 | 0.7 | 3.0 |
| DR660(DR231-DR589) | 4004 | 0.8 | 3.3 |
| DR661(DR231-DR590) | 4644 | 0.9 | 3.8 |
| DR662(DR232-DR214) | 3868 | 0.8 | 3.2 |
| DR663(DR232-DR217) | 4032 | 0.8 | 3.3 |
| DR664(DR232-DR583) | 4272 | 0.9 | 3.5 |
| DR665(DR232-DR584) | 4096 | 0.8 | 3.4 |
| DR666(DR232-DR585) | 3702 | 0.8 | 3.1 |
| DR667(DR232-DR586) | 4084 | 0.8 | 3.4 |
| DR668(DR232-DR587) | 4176 | 0.8 | 3.5 |
| DR669(DR232-DR588) | 4330 | 0.9 | 3.6 |
| DR670(DR232-DR589) | 3540 | 0.7 | 2.9 |
| DR671(DR232-DR590) | 4458 | 0.9 | 3.7 |
| DR672(DR233-DR214) | 3636 | 0.7 | 3.0 |
| DR673(DR233-DR217) | 4986 | 1.0 | 4.1 |
| DR674(DR233-DR583) | 3960 | 0.8 | 3.3 |
| DR675(DR233-DR584) | 5088 | 1.0 | 4.2 |
| DR676(DR233-DR584) | 4692 | 1.0 | 3.9 |
| DR677(DR233-DR586) | 4190 | 0.9 | 3.5 |
| DR678(DR233-DR587) | 4488 | 0.9 | 3.7 |
| DR679(DR233-DR588) | 4550 | 0.9 | 3.8 |
| DR680(DR233-DR589) | 4064 | 0.8 | 3.4 |
| DR681(DR233-DR590) | 3826 | 0.8 | 3.2 |
| DR682(DR234-DR214) | 4498 | 0.9 | 3.7 |
| DR683(DR234-DR217) | 4198 | 0.9 | 3.5 |
| DR684(DR234-DR583) | 4024 | 0.8 | 3.3 |
| DR685(DR234-DR584) | 4090 | 0.8 | 3.4 |
| DR686(DR234-DR585) | 3738 | 0.8 | 3.1 |
| DR687(DR234-DR586) | 4344 | 0.9 | 3.6 |
| DR688(DR234-DR587) | 3936 | 0.8 | 3.3 |
| DR689(DR234-DR588) | 4376 | 0.9 | 3.6 |
| DR690(DR234-DR589) | 3916 | 0.8 | 3.2 |
| DR691(DR234-DR590) | 4522 | 0.9 | 3.7 |
| DR692(DR214-DR229) | 3442 | 0.7 | 2.8 |
| DR693(DR214-DR230) | 4450 | 0.9 | 3.7 |
| DR694(DR214-DR231) | 3786 | 0.8 | 3.1 |
| DR695(DR214-DR232) | 4152 | 0.8 | 3.4 |
| DR696(DR214-DR233) | 4728 | 1.0 | 3.9 |
| DR697(DR214-DR234) | 4504 | 0.9 | 3.7 |
| DR698(DR217-DR229) | 3678 | 0.7 | 3.0 |
| DR699(DR217-DR230) | 4686 | 1.0 | 3.9 |
| DR700(DR217-DR231) | 3620 | 0.7 | 3.0 |
| DR701(DR217-DR232) | 5122 | 1.0 | 4.2 |
| DR702(DR217-DR233) | 3906 | 0.8 | 3.2 |
| DR703(DR217-DR234) | 4974 | 1.0 | 4.1 |
| DR704(DR583-DR229) | 5820 | 1.2 | 4.8 |
| DR705(DR583-DR230) | 3818 | 0.8 | 3.2 |
| DR706(DR583-DR231) | 6230 | 1.3 | 5.2 |
| DR707(DR583-DR232) | 4102 | 0.8 | 3.4 |
| DR708(DR583-DR233) | 4226 | 0.9 | 3.5 |
| DR709(DR583-DR234) | 4088 | 0.8 | 3.4 |
| DR710(DR584-DR229) | 3950 | 0.8 | 3.3 |
| DR711(DR584-DR230) | 4766 | 1.0 | 3.9 |
| DR712(DR584-DR231) | 3792 | 0.8 | 3.1 |
| DR713(DR584-DR232) | 4372 | 0.9 | 3.6 |
| DR714(DR584-DR233) | 4544 | 0.9 | 3.8 |
| DR715(DR584-DR234) | 5128 | 1.0 | 4.2 |
| DR716(DR585-DR229) | 3756 | 0.8 | 3.1 |
| DR717(DR585-DR230) | 4592 | 0.9 | 3.8 |
| DR718(DR585-DR231) | 5416 | 1.1 | 4.5 |
| DR719(DR585-DR232) | 5422 | 1.1 | 4.5 |
| DR720(DR585-DR233) | 3590 | 0.7 | 3.0 |
| DR721(DR585-DR234) | 4936 | 1.0 | 4.1 |
| DR722(DR586-DR229) | 4006 | 0.8 | 3.3 |
| DR723(DR586-DR230) | 6542 | 1.3 | 5.4 |
| DR724(DR586-DR231) | 3444 | 0.7 | 2.8 |
| DR725(DR586-DR232) | 5026 | 1.0 | 4.2 |
| DR726(DR586-DR233) | 4974 | 1.0 | 4.1 |
| DR727(DR586-DR234) | 5820 | 1.2 | 4.8 |
| DR728(DR587-DR229) | 10826 | 2.2 | 9.0 |
| DR729(DR587-DR230) | 3782 | 0.8 | 3.1 |
| DR730(DR587-DR231) | 4658 | 0.9 | 3.9 |
| DR731(DR587-DR232) | 3740 | 0.8 | 3.1 |
| DR732(DR587-DR233) | 4268 | 0.9 | 3.5 |
| DR733(DR587-DR234) | 3770 | 0.8 | 3.1 |
| DR734(DR588-DR229) | 4510 | 0.9 | 3.7 |
| DR735(DR588-DR230) | 3648 | 0.7 | 3.0 |
| DR736(DR588-DR231) | 3610 | 0.7 | 3.0 |
| DR737(DR588-DR232) | 3492 | 0.7 | 2.9 |
| DR738(DR588-DR233) | 4114 | 0.8 | 3.4 |
| DR739(DR588-DR234) | 3380 | 0.7 | 2.8 |
| DR740(DR589-DR229) | 4142 | 0.8 | 3.4 |
| DR741(DR589-DR230) | 3336 | 0.7 | 2.8 |
| DR742(DR589-DR231) | 3804 | 0.8 | 3.1 |
| DR743(DR589-DR232) | 3622 | 0.7 | 3.0 |
| DR744(DR589-DR233) | 4364 | 0.9 | 3.6 |
| DR745(DR589-DR234) | 3950 | 0.8 | 3.3 |
| DR746(DR590-DR229) | 3910 | 0.8 | 3.2 |
| DR747(DR590-DR230) | 3730 | 0.8 | 3.1 |
| DR748(DR590-DR231) | 4022 | 0.8 | 3.3 |
| DR749(DR590-DR232) | 3822 | 0.8 | 3.2 |
| DR750(DR590-DR233) | 3642 | 0.7 | 3.0 |
| DR751(DR590-DR234) | 4052 | 0.8 | 3.4 |
| medium | 4917 | 1.0 | 4.1 |
| IL2 | 120918 | 24.6 | 100.0 |

### Example 17—Evaluation of Activity of Anti-IL2Rβ/γ V_{H}H²s On Total PBMC

[0604] The anti-IL2Rβ/γ V_{H}H²s were evaluated for activity in non-activated PBMC. T cells and NK cells express IL2Rβ and IL2Rγ chains and are able to proliferate and produce IFN-γ in response to IL2 receptor signaling.

[0605] PBMC were isolated from LRS Chambers using the human Buffy Coat/LRSC PBMC Isolation Kit (Miltenyi). LRS Chambers were harvested in separation buffer (DPBS, 0.5% BSA, 2 mM EDTA) and mixed with sedimentation buffer and Red Blood Cell (RBC) removal antibodies and EDTA at a final concentration of 5 mM in 50 mL Centrifuge tubes. Tubes were centrifuged at 50×g for 3 minutes at room temperature. Supernatant with cells was collected and transferred to a new 50 mL centrifuge tube and separation buffer was added to 50 mL. Tubes were centrifuged at 300×g for 5 minutes at room temperature and supernatant discarded. Cell pellets were resuspended in 4 mL separation buffer and 2 mL Erythrocyte Depletion Microbeads and 1 mL Granulocyte Depletion Microbeads were added. Cells were incubated for 10 minutes at 2-8 degrees centigrade and PBMC were isolated on an AutoMacs Pro instrument (Miltenyi) using protocol ‘Cust 5’. PBMC were counted on a Vi-Cell XR instrument (Beckman). PBMC were isolated from 2 independent donors designated D24 and D26.

[0606] PBMC were cultured in growth medium consisting of Yssel's medium (Iscove's modified Dulbecco's Medium (ThermoFisher), 0.25% w/v percent human albumin (Sigma), 1 percent penicillin/streptomycin (ThermoFisher), 1 percent ITS-X Insulin, Transferrin, Selenium (Gibco), 30 mg/L Tansferrin (Roche), 2 mg/L Palmitic Acid (Sigma), 1 percent LA-OA-Albumin Linoleic Acid, Oleic Acid (Sigma), 1 percent human serum (Gemini) (Yssel et al (1984) J Immunol Methods 72: 219-227). Cells were resuspended at 2 million cells/mL in Yssel's medium. Anti-IL2Rβ/γ V_{H}H²s were diluted into 96-well plates (Falcon) to 30 nM in 100 μl Yssel's medium and 200 thousand total PBMC were added per well in 100 μl Yssel's medium. Controls included wells without anti-IL2Rβ/γ V_{H}H²s or human IL2 (media) and wells with human IL2 at a final concentration of 100 pM. Plates were transferred to a humidified incubator (ThermoFisher) and incubated at 37 degrees centigrade, 5 percent carbon dioxide for 6 days.

[0607] Plates were removed from the incubator and 100 μl of culture supernatant was harvested in to a 96 well flat bottom plate (Costar). To examine proliferation in these cultures, cells were harvested from wells that still contained viable cells upon visual inspection and were phenotyped for expression of CD3, CD56, CD4, CD8, and CD25 by direct immunofluorescence using fluorochrome conjugated mAbs on a Cytometer. Briefly, cells were collected from tissue culture wells and transferred to a 96 well round v-bottom plate and washed twice with FACS buffer (PBS+0.5% BSA). Pellets were resuspended in 100 μL 1/1000 diluted Viabillity dye EF506 (Biolegend) and incubated for 30 min at room temperature. Cells were washed twice with FACS buffer and resuspended in 50 μL blocking solution (FACS buffer with 2% normal mouse serum (Jackson Labs) and 10% Human FcX Block (Biolegend)) and incubated for 30 min at 4 degrees centigrade. Anti-CD3-Fitc, anti-CD56-AF700, anti-CD4-BV786, anti-CD8-APC-Cy7 and anti-CD25-BV421 were added to the cells in FACS buffer at the manufacturer's recommended concentration and cells were incubated for 30 min at 4 degrees centigrade. Cells were washed twice with FACS buffer, fixed in DPBS with 1% paraformaldehyde (Sigma) and analyzed on an Aurora Cytek Cytometer. Expression of markers was analyzed on single live cells using SpectroFlo v2.2.0.4 software.

[0608] Production of IFNγ in the culture supernatants was measured using the MSD IFNγ V-Plex kit (MSD K151QOD) according to manufacturer's instructions. Briefly, mAb precoated MSD IFNγ assay plates were washed 3 times with 150 μL Tris Wash Buffer and IFNγ standards were diluted in Diluent 2. Culture supernatants were diluted 1:5 with Diluent 2 and 50 μL of samples and standards were added to the IFNγ assay plates and incubated for 120 min on an orbital shaker (VWR Scientific) at 300 rpm at room temperature. Plates were washed 3 times with Tris Wash Buffer and 25 μL 1×detection antibody in Diluent 3 was added to each well. Plates were incubated for 60 min on an orbital shaker (VWR Scientific) at 300 rpm at room temperature. Plates were washed 3 times with Tris Wash Buffer and 150 μL 2× Read Buffer T was added to each well and Luminescence signal was read on a Mesoscale Quickplex SQ 120 instrument. Concentration of IFNγ in the supernatants were calculated based on the standard curve with MSD Discovery Workbench software.

[0609] To compare the effect of each anti-IL2Rβ/γ V_{H}H²s variant upon total PBMC IFNγ production, IFNγ concentrations for cells treated with anti-IL2Rβ/γ V_{H}H²s were compared to those obtained for control cells treated with growth medium alone to yield a fold induction and with control cells treated with human IL2 to yield an activity relative to the response to IL2 as a percentage. The data from these experiments is presented in Table 18 and Table 19.

TABLE 24
Activity of VHH dimers on PBMC IFN-
γ production and phenotype Donor 1.

| Anti-IL2Rβ/γ V_{H}H² | IFN-γ | T cells | NK cells |
|---|---|---|---|
| Construct | Production (LU) | (% CD3+) | (% CD56+) |
| DR632(DR229-DR214) | 135 | | |
| DR633(DR229-DR217) | 104 | | |
| DR634(DR229-DR583) | 16798 | 48.49 | 35.09 |
| DR635(DR229-DR584) | 186103 | 47.77 | 50.35 |
| DR636(DR229-DR585) | 2396 | 96.58 | 2.03 |
| DR637(DR229-DR586) | 212 | | |
| DR638(DR229-DR587) | 399282 | 41.98 | 55.82 |
| DR639(DR229-DR587) | 5160 | 50.32 | 47.22 |
| DR640(DR229-DR589) | 786 | | |
| DR641(DR229-DR590) | 94 | | |
| DR642(DR230-DR214) | 9540 | 42.72 | 55.39 |
| DR643(DR230-DR217) | 43321 | 46.6 | 51.51 |
| DR644(DR230-DR583) | 14668 | 62.91 | 33.69 |
| DR645(DR230-DR584) | 1462066 | 36.3 | 60.92 |
| DR646(DR230-DR585) | 258 | | |
| DR647(DR230-DR586) | 50480 | 46 | 51.99 |
| DR648(DR230-DR587) | 70954 | 42.48 | 55.24 |
| DR649(DR230-DR588) | 301 | | |
| DR650(DR230-DR589) | 85 | | |
| DR651(DR230-DR590) | 76 | | |
| DR652(DR231-DR214) | 167926 | 44.52 | 53.45 |
| DR653(DR231-DR217) | 633 | | |
| DR654(DR231-DR583) | 275 | | |
| DR655(DR231-DR584) | 18389 | 74.95 | 21.18 |
| DR656(DR231-DR585) | 552204 | 38.8 | 59.01 |
| DR657(DR231-DR586) | 87 | | |
| DR658(DR231-DR587) | 97 | | |
| DR659(DR231-DR588) | 83 | | |
| DR660(DR231-DR589) | 87 | | |
| DR661(DR231-DR590) | 82 | | |
| DR662(DR232-DR214) | 94 | | |
| DR663(DR232-DR217) | 283 | | |
| DR664(DR232-DR583) | 113 | | |
| DR665(DR232-DR584) | 79 | | |
| DR666(DR232-DR585) | 161 | | |
| DR667(DR232-DR586) | 239 | | |
| DR668(DR232-DR587) | 81 | | |
| DR669(DR232-DR588) | 247 | | |
| DR670(DR232-DR589) | 90 | | |
| DR671(DR232-DR590) | 526 | | |
| DR672(DR233-DR214) | 1087 | | |
| DR673(DR233-DR217) | 8738 | 41.99 | 55.81 |
| DR674(DR233-DR583) | 2842 | 38.7 | 59.4 |
| DR675(DR233-DR584) | 32239 | 44.85 | 53.27 |
| DR676(DR233-DR584) | 83 | | |
| DR677(DR233-DR586) | 298 | | |
| DR678(DR233-DR587) | 32319 | 46.56 | 51.48 |
| DR679(DR233-DR588) | 121672 | 36.13 | 61.88 |
| DR680(DR233-DR589) | 11020 | 46.18 | 52.08 |
| DR681(DR233-DR590) | 159 | | |
| DR682(DR234-DR214) | 3571 | 59.92 | 36.44 |
| DR683(DR234-DR217) | 94 | | |
| DR684(DR234-DR583) | 82 | | |
| DR685(DR234-DR584) | 516 | | |
| DR686(DR234-DR585) | 168 | | |
| DR687(DR234-DR586) | 85 | | |
| DR688(DR234-DR587) | 2812 | 39.99 | 57.85 |
| DR689(DR234-DR588) | 890 | | |
| DR690(DR234-DR589) | 246 | | |
| DR691(DR234-DR590) | 85 | | |
| DR692(DR214-DR229) | 88 | | |
| DR693(DR214-DR230) | 74 | | |
| DR694(DR214-DR231) | 76 | | |
| DR695(DR214-DR232) | 828 | | |
| DR696(DR214-DR233) | 111 | | |
| DR697(DR214-DR234) | 132 | | |
| DR698(DR217-DR229) | 78 | | |
| DR699(DR217-DR230) | 104 | | |
| DR700(DR217-DR231) | 96 | | |
| DR701(DR217-DR232) | 2570 | 57.26 | 40.3 |
| DR702(DR217-DR233) | 90 | | |
| DR703(DR217-DR234) | 162 | | |
| DR704(DR583-DR229) | 85 | | |
| DR705(DR583-DR230) | 83 | | |
| DR706(DR583-DR231) | 81 | | |
| DR707(DR583-DR232) | 80 | | |
| DR708(DR583-DR233) | 77 | | |
| DR709(DR583-DR234) | 82 | | |
| DR710(DR584-DR229) | 67 | | |
| DR711(DR584-DR230) | 181 | | |
| DR712(DR584-DR231) | 94 | | |
| DR713(DR584-DR232) | 117 | | |
| DR714(DR584-DR233) | 1932 | 92.95 | 3.96 |
| DR715(DR584-DR234) | 76 | | |
| DR716(DR585-DR229) | 5178 | 36.89 | 61.04 |
| DR717(DR585-DR230) | 14665 | 48.32 | 49.33 |
| DR718(DR585-DR231) | 79834 | 40.28 | 58.21 |
| DR719(DR585-DR232) | 20846 | 38.28 | 59.66 |
| DR720(DR585-DR233) | 734 | | |
| DR721(DR585-DR234) | 68144 | 40.48 | 57.36 |
| DR722(DR586-DR229) | 5762 | 45.21 | 53 |
| DR723(DR586-DR230) | 120 | | |
| DR724(DR586-DR231) | 12094 | 46.7 | 51.26 |
| DR725(DR586-DR232) | 170 | | |
| DR726(DR586-DR233) | 79 | | |
| DR727(DR586-DR234) | 79 | | |
| DR728(DR587-DR229) | 92 | | |
| DR729(DR587-DR230) | 78 | | |
| DR730(DR587-DR231) | 93 | | |
| DR731(DR587-DR232) | 90 | | |
| DR732(DR587-DR233) | 503 | | |
| DR733(DR587-DR234) | 81 | | |
| DR734(DR588-DR229) | 878 | | |
| DR735(DR588-DR230) | 630 | | |
| DR736(DR588-DR231) | 136028 | 41.38 | 56.82 |
| DR737(DR588-DR232) | 567 | | |
| DR738(DR588-DR233) | 224 | | |
| DR739(DR588-DR234) | 1454 | | |
| DR740(DR589-DR229) | 1272 | 78.22 | 17.89 |
| DR741(DR589-DR230) | 2216 | 79.76 | 17 |
| DR742(DR589-DR231) | 296 | | |
| DR743(DR589-DR232) | 98 | | |
| DR744(DR589-DR233) | 1099 | 85.55 | 10.34 |
| DR745(DR589-DR234) | 91 | | |
| DR746(DR590-DR229) | 868 | | |
| DR747(DR590-DR230) | 3385 | 41.18 | 56.19 |
| DR748(DR590-DR231) | 834 | | |
| DR749(DR590-DR232) | 90 | | |
| DR750(DR590-DR233) | 115 | | |
| DR751(DR590-DR234) | 98 | | |
| medium | 235 | | |
| IL2 | 338863 | 63.24 | 34.52 |

TABLE 25
Activity of VHH dimers on PBMC IFN-
γ production and phenotype Donor 2.

| Anti-IL2Rβ/γ V_{H}H² | IFN-γ | T cells | NK cells |
|---|---|---|---|
| Construct | Production (LU) | (% CD+) | (% CD56+) |
| DR632(DR229-DR214) | 117 | | |
| DR633(DR229-DR217) | 163 | | |
| DR634(DR229-DR583) | 5188 | 62.22 | 35.73 |
| DR635(DR229-DR584) | 11871 | 51.63 | 46.16 |
| DR636(DR229-DR585) | 127 | 97.46 | 0.3 |
| DR637(DR229-DR586) | 126 | | |
| DR638(DR229-DR587) | 40748 | 50.69 | 47.15 |
| DR639(DR229-DR587) | 2237 | 58.85 | 39.54 |
| DR640(DR229-DR589) | 3128 | | |
| DR641(DR229-DR590) | 74 | | |
| DR642(DR230-DR214) | 1043 | 58.95 | 39.26 |
| DR643(DR230-DR217) | 12027 | 50.19 | 47.74 |
| DR644(DR230-DR583) | 1395 | 77.48 | 20 |
| DR645(DR230-DR584) | 147962 | 56.88 | 41.48 |
| DR646(DR230-DR585) | 105 | | |
| DR647(DR230-DR586) | 24426 | 51.6 | 46.43 |
| DR648(DR230-DR587) | 16661 | 53.06 | 45.12 |
| DR649(DR230-DR588) | 107 | | |
| DR650(DR230-DR589) | 86 | | |
| DR651(DR230-DR590) | 101 | | |
| DR652(DR231-DR214) | 21818 | 49.74 | 47.99 |
| DR653(DR231-DR217) | 265 | | |
| DR654(DR231-DR583) | 81 | | |
| DR655(DR231-DR584) | 8336 | 81.11 | 15.93 |
| DR656(DR231-DR585) | 165479 | 55.4 | 42.95 |
| DR657(DR231-DR586) | 81 | | |
| DR658(DR231-DR587) | 101 | | |
| DR659(DR231-DR588) | 85 | | |
| DR660(DR231-DR589) | 85 | | |
| DR661(DR231-DR590) | 77 | | |
| DR662(DR232-DR214) | 77 | | |
| DR663(DR232-DR217) | 232 | | |
| DR664(DR232-DR583) | 101 | | |
| DR665(DR232-DR584) | 82 | | |
| DR666(DR232-DR585) | 87 | | |
| DR667(DR232-DR586) | 180 | | |
| DR668(DR232-DR587) | 89 | | |
| DR669(DR232-DR588) | 82 | | |
| DR670(DR232-DR589) | 84 | | |
| DR671(DR232-DR590) | 250 | | |
| DR672(DR233-DR214) | 323 | | |
| DR673(DR233-DR217) | 1977 | 65.3 | 32.57 |
| DR674(DR233-DR583) | 2565 | 61.54 | 36.29 |
| DR675(DR233-DR584) | 41300 | 42.86 | 55.03 |
| DR676(DR233-DR584) | 82 | | |
| DR677(DR233-DR586) | 242 | | |
| DR678(DR233-DR587) | 18981 | 53.53 | 44.54 |
| DR679(DR233-DR588) | 5117 | 57.75 | 40.55 |
| DR680(DR233-DR589) | 2370 | 63.81 | 34.23 |
| DR681(DR233-DR590) | 154 | | |
| DR682(DR234-DR214) | 1462 | 68.15 | 29.23 |
| DR683(DR234-DR217) | 145 | | |
| DR684(DR234-DR583) | 109 | | |
| DR685(DR234-DR584) | 840 | | |
| DR686(DR234-DR585) | 89 | | |
| DR687(DR234-DR586) | 79 | | |
| DR688(DR234-DR587) | 653 | 58.97 | 38.6 |
| DR689(DR234-DR588) | 332 | | |
| DR690(DR234-DR589) | 132 | | |
| DR691(DR234-DR590) | 73 | | |
| DR692(DR214-DR229) | 101 | | |
| DR693(DR214-DR230) | 88 | | |
| DR694(DR214-DR231) | 76 | | |
| DR695(DR214-DR232) | 78 | | |
| DR696(DR214-DR233) | 92 | | |
| DR697(DR214-DR234) | 117 | | |
| DR698(DR217-DR229) | 82 | | |
| DR699(DR217-DR230) | 173 | | |
| DR700(DR217-DR231) | 100 | | |
| DR701(DR217-DR232) | 1227 | 63.05 | 35.35 |
| DR702(DR217-DR233) | 96 | | |
| DR703(DR217-DR234) | 1143 | | |
| DR704(DR583-DR229) | 185 | | |
| DR705(DR583-DR230) | 81 | | |
| DR706(DR583-DR231) | 84 | | |
| DR707(DR583-DR232) | 96 | | |
| DR708(DR583-DR233) | 83 | | |
| DR709(DR583-DR234) | 84 | | |
| DR710(DR584-DR229) | 72 | | |
| DR711(DR584-DR230) | 75 | | |
| DR712(DR584-DR231) | 75 | | |
| DR713(DR584-DR232) | 91 | | |
| DR714(DR584-DR233) | 63 | 95.35 | 2.33 |
| DR715(DR584-DR234) | 228 | | |
| DR716(DR585-DR229) | 1273 | 55.37 | 42.69 |
| DR717(DR585-DR230) | 26060 | 45.59 | 51.88 |
| DR718(DR585-DR231) | 38220 | 46.94 | 50.75 |
| DR719(DR585-DR232) | 1850 | 88.89 | 6.13 |
| DR720(DR585-DR233) | 766 | | |
| DR721(DR585-DR234) | 24693 | 48.32 | 49.32 |
| DR722(DR586-DR229) | 5851 | 52.03 | 46.36 |
| DR723(DR586-DR230) | 173 | | |
| DR724(DR586-DR231) | 3693 | 57.36 | 40.62 |
| DR725(DR586-DR232) | 93 | | |
| DR726(DR586-DR233) | 85 | | |
| DR727(DR586-DR234) | 91 | | |
| DR728(DR587-DR229) | 340 | | |
| DR729(DR587-DR230) | 95 | | |
| DR730(DR587-DR231) | 237 | | |
| DR731(DR587-DR232) | 99 | | |
| DR732(DR587-DR233) | 113 | | |
| DR733(DR587-DR234) | 142 | | |
| DR734(DR588-DR229) | 4151 | | |
| DR735(DR588-DR230) | 625 | | |
| DR736(DR588-DR231) | 2595 | 55.41 | 42.05 |
| DR737(DR588-DR232) | 923 | | |
| DR738(DR588-DR233) | 104 | | |
| DR739(DR588-DR234) | 830 | | |
| DR740(DR589-DR229) | 873 | 86.55 | 6.04 |
| DR741(DR589-DR230) | 629 | 84.17 | 9.79 |
| DR742(DR589-DR231) | 198 | | |
| DR743(DR589-DR232) | 82 | | |
| DR744(DR589-DR233) | 625 | 82.76 | 8.27 |
| DR745(DR589-DR234) | 81 | | |
| DR746(DR590-DR229) | 212 | | |
| DR747(DR590-DR230) | 2272 | 68.05 | 29.44 |
| DR748(DR590-DR231) | 1050 | | |
| DR749(DR590-DR232) | 386 | | |
| DR750(DR590-DR233) | 138 | | |
| DR751(DR590-DR234) | 88 | | |
| medium | 226 | | |
| IL2 | 174981 | 64.09 | 33.48 |

LU: Luminescence Units.
n/a: not applicable

[0610] In this assay 54/120 anti-IL2Rβ/γ V_{H}H²s induced PBMC IFNγ production in D24 (>1Fold) and 48/120 anti-IL2Rβ/γ V_{H}H²s induced PBMC IFNγ production in D26 at distinct levels. Anti-IL2Rβ/γ V_{H}H²s that induced IFNγ production generally did so in both donors. One Anti-IL2Rβ/γ V_{H}H² in D24 PBMC induced IFNγ production above levels observed with IL2 at 100 pM.

[0611] Thirty six of the PBMC cultures that expanded and showed induction of IFNγ production were phenotyped to determine which cell populations were affected by IL2Rβ/γ V_{H}H²s. Percentages of T cells (CD3 positive) and percentages NK cells (CD56 positive) in each culture of PBMC D24 and D26 are shown in Table 26. In this assay 7/36 anti-IL2Rβ/γ V_{H}H²s in D24 PBMC and 15/36 anti-IL2Rβ/γ V_{H}H²s in D26 PBMC cultures showed a T cell biased expansion as defined by a greater than 60% of the population CD3 positive with some cultures as high as >90%. Conversely, 26/36 anti-IL2Rβ/γ V_{H}H²s in D24 PBMC and 11/36 anti-IL2Rβ/γ V_{H}H²s in D26 PBMC cultures showed an NK cell bias as defined by a greater than 45% of the population CD56 positive. In either T cell biased cultures and NK cell biased cultures anti-IL2Rβ/γ V_{H}H²s did not induce a preferential outgrowth of CD4 or CD8 positive T cells with ratio's CD4:CD8 around 2:1 (Table 29).

TABLE 26
IFNγ Production by Anti-IL2Rβ/γ V_{H}H² on Total PBMC Donor24

| | PBMC | Relative | Relative |
|---|---|---|---|
| | Cell | IFNγ | IFNγ |
| | IFNγ | Induction | Induction |
| Anti-IL2Rβ/γ V_{H}H² | Production | (fold | (% hIL2 |
| Construct | (pg/mL) | induction) | response) |
| DR632(DR229-DR214) | 4 | 0.4 | 0.0 |
| DR633(DR229-DR217) | 2 | 0.2 | 0.0 |
| DR634(DR229-DR583) | 1429 | 119.1 | 2.3 |
| DR635(DR229-DR584) | 17452 | 1454.3 | 28.0 |
| DR636(DR229-DR585) | 184 | 15.3 | 0.3 |
| DR637(DR229-DR586) | 10 | 0.8 | 0.0 |
| DR638(DR229-DR587) | 38635 | 3219.6 | 62.1 |
| DR639(DR229-DR587) | 415 | 34.6 | 0.7 |
| DR640(DR229-DR589) | 54 | 4.5 | 0.1 |
| DR641(DR229-DR590) | 1 | 0.1 | 0.0 |
| DR642(DR230-DR214) | 791 | 65.9 | 1.3 |
| DR643(DR230-DR217) | 3832 | 319.3 | 6.2 |
| DR644(DR230-DR583) | 1240 | 103.4 | 2.0 |
| DR645(DR230-DR584) | 150112 | 12509.3 | 241.1 |
| DR646(DR230-DR585) | 13 | 1.1 | 0.0 |
| DR647(DR230-DR586) | 4493 | 374.4 | 7.2 |
| DR648(DR230-DR587) | 6402 | 533.5 | 10.3 |
| DR649(DR230-DR588) | 17 | 1.4 | 0.0 |
| DR650(DR230-DR589) | 1 | 0.1 | 0.0 |
| DR651(DR230-DR590) | 0 | 0.0 | 0.0 |
| DR652(DR231-DR214) | 15682 | 1306.9 | 25.2 |
| DR653(DR231-DR217) | 42 | 3.5 | 0.1 |
| DR654(DR231-DR583) | 15 | 1.2 | 0.0 |
| DR655(DR231-DR584) | 1570 | 130.8 | 2.5 |
| DR656(DR231-DR585) | 54176 | 4514.7 | 87.0 |
| DR657(DR231-DR586) | 1 | 0.1 | 0.0 |
| DR658(DR231-DR587) | 2 | 0.1 | 0.0 |
| DR659(DR231-DR588) | 1 | 0.1 | 0.0 |
| DR660(DR231-DR589) | 1 | 0.1 | 0.0 |
| DR661(DR231-DR590) | 1 | 0.1 | 0.0 |
| DR662(DR232-DR214) | 1 | 0.1 | 0.0 |
| DR663(DR232-DR217) | 15 | 1.3 | 0.0 |
| DR664(DR232-DR583) | 3 | 0.2 | 0.0 |
| DR665(DR232-DR584) | 0 | 0.0 | 0.0 |
| DR666(DR232-DR585) | 6 | 0.5 | 0.0 |
| DR667(DR232-DR586) | 12 | 1.0 | 0.0 |
| DR668(DR232-DR587) | 1 | 0.0 | 0.0 |
| DR669(DR232-DR588) | 13 | 1.0 | 0.0 |
| DR670(DR232-DR589) | 1 | 0.1 | 0.0 |
| DR671(DR232-DR590) | 34 | 2.8 | 0.1 |
| DR672(DR233-DR214) | 78 | 6.5 | 0.1 |
| DR673(DR233-DR217) | 722 | 60.1 | 1.2 |
| DR674(DR233-DR583) | 221 | 18.4 | 0.4 |
| DR675(DR233-DR584) | 2818 | 234.8 | 4.5 |
| DR676(DR233-DR584) | 1 | 0.1 | 0.0 |
| DR677(DR233-DR586) | 16 | 1.4 | 0.0 |
| DR678(DR233-DR587) | 2825 | 235.4 | 4.5 |
| DR679(DR233-DR588) | 11217 | 934.8 | 18.0 |
| DR680(DR233-DR589) | 920 | 76.7 | 1.5 |
| DR681(DR233-DR590) | 6 | 0.5 | 0.0 |
| DR682(DR234-DR214) | 281 | 23.5 | 0.5 |
| DR683(DR234-DR217) | 1 | 0.1 | 0.0 |
| DR684(DR234-DR583) | 1 | 0.1 | 0.0 |
| DR685(DR234-DR584) | 33 | 2.8 | 0.1 |
| DR686(DR234-DR585) | 7 | 0.6 | 0.0 |
| DR687(DR234-DR586) | 1 | 0.1 | 0.0 |
| DR688(DR234-DR587) | 218 | 18.2 | 0.4 |
| DR689(DR234-DR588) | 62 | 5.2 | 0.1 |
| DR690(DR234-DR589) | 13 | 1.0 | 0.0 |
| DR691(DR234-DR590) | 1 | 0.1 | 0.0 |
| DR692(DR214-DR229) | 1 | 0.1 | 0.0 |
| DR693(DR214-DR230) | 0 | 0.0 | 0.0 |
| DR694(DR214-DR231) | 0 | 0.0 | 0.0 |
| DR695(DR214-DR232) | 57 | 4.8 | 0.1 |
| DR696(DR214-DR233) | 3 | 0.2 | 0.0 |
| DR697(DR214-DR234) | 4 | 0.3 | 0.0 |
| DR698(DR217-DR229) | 0 | 0.0 | 0.0 |
| DR699(DR217-DR230) | 2 | 0.2 | 0.0 |
| DR700(DR217-DR231) | 2 | 0.1 | 0.0 |
| DR701(DR217-DR232) | 198 | 16.5 | 0.3 |
| DR702(DR217-DR233) | 1 | 0.1 | 0.0 |
| DR703(DR217-DR234) | 6 | 0.5 | 0.0 |
| DR704(DR583-DR229) | 1 | 0.1 | 0.0 |
| DR705(DR583-DR230) | 1 | 0.1 | 0.0 |
| DR706(DR583-DR231) | 1 | 0.1 | 0.0 |
| DR707(DR583-DR232) | 1 | 0.1 | 0.0 |
| DR708(DR583-DR233) | 0 | 0.0 | 0.0 |
| DR709(DR583-DR234) | 1 | 0.1 | 0.0 |
| DR710(DR584-DR229) | 1 | 0.1 | 0.0 |
| DR711(DR584-DR230) | 10 | 0.8 | 0.0 |
| DR712(DR584-DR231) | 1 | 0.1 | 0.0 |
| DR713(DR584-DR232) | 3 | 0.3 | 0.0 |
| DR714(DR584-DR233) | 207 | 17.2 | 0.3 |
| DR715(DR584-DR234) | 1 | 0.0 | 0.0 |
| DR716(DR585-DR229) | 417 | 34.7 | 0.7 |
| DR717(DR585-DR230) | 1240 | 103.3 | 2.0 |
| DR718(DR585-DR231) | 12598 | 1049.9 | 20.2 |
| DR719(DR585-DR232) | 2891 | 241.0 | 4.6 |
| DR720(DR585-DR233) | 50 | 4.2 | 0.1 |
| DR721(DR585-DR234) | 6138 | 511.5 | 9.9 |
| DR722(DR586-DR229) | 702 | 58.5 | 1.1 |
| DR723(DR586-DR230) | 4 | 0.3 | 0.0 |
| DR724(DR586-DR231) | 1014 | 84.5 | 1.6 |
| DR725(DR586-DR232) | 7 | 0.6 | 0.0 |
| DR726(DR586-DR233) | 1 | 0.1 | 0.0 |
| DR727(DR586-DR234) | 1 | 0.1 | 0.0 |
| DR728(DR587-DR229) | 2 | 0.1 | 0.0 |
| DR729(DR587-DR230) | 1 | 0.1 | 0.0 |
| DR730(DR587-DR231) | 2 | 0.2 | 0.0 |
| DR731(DR587-DR232) | 2 | 0.1 | 0.0 |
| DR732(DR587-DR233) | 42 | 3.5 | 0.1 |
| DR733(DR587-DR234) | 1 | 0.1 | 0.0 |
| DR734(DR588-DR229) | 83 | 6.9 | 0.1 |
| DR735(DR588-DR230) | 56 | 4.7 | 0.1 |
| DR736(DR588-DR231) | 22589 | 1882.4 | 36.3 |
| DR737(DR588-DR232) | 49 | 4.1 | 0.1 |
| DR738(DR588-DR233) | 14 | 1.1 | 0.0 |
| DR739(DR588-DR234) | 150 | 12.5 | 0.2 |
| DR740(DR589-DR229) | 128 | 10.7 | 0.2 |
| DR741(DR589-DR230) | 242 | 20.1 | 0.4 |
| DR742(DR589-DR231) | 21 | 1.7 | 0.0 |
| DR743(DR589-DR232) | 2 | 0.2 | 0.0 |
| DR744(DR589-DR233) | 108 | 9.0 | 0.2 |
| DR745(DR589-DR234) | 2 | 0.1 | 0.0 |
| DR746(DR590-DR229) | 82 | 6.8 | 0.1 |
| DR747(DR590-DR230) | 389 | 32.4 | 0.6 |
| DR748(DR590-DR231) | 78 | 6.5 | 0.1 |
| DR749(DR590-DR232) | 2 | 0.1 | 0.0 |
| DR750(DR590-DR233) | 4 | 0.3 | 0.0 |
| DR751(DR590-DR234) | 2 | 0.2 | 0.0 |
| medium | 12 | 1.0 | 0.0 |
| IL2 | 62250 | 5187.5 | 100.0 |

TABLE 27
IFNγ Production by Anti-IL2Rβ/γ V_{H}H² on Total PBMC Donor 26

| | PBMC | Relative | Relative |
|---|---|---|---|
| | Cell | IFNγ | IFNγ |
| | IFNγ | Induction | Induction |
| Anti-IL2Rβ/γ V_{H}H² | Production | (fold | (% hIL2 |
| Construct | (pg/mL) | induction) | response) |
| DR632(DR229-DR214) | 4 | 0.3 | 0.0 |
| DR633(DR229-DR217) | 7 | 0.5 | 0.0 |
| DR634(DR229-DR583) | 476 | 34.0 | 1.6 |
| DR635(DR229-DR584) | 1133 | 81.0 | 3.7 |
| DR636(DR229-DR585) | 4 | 0.3 | 0.0 |
| DR637(DR229-DR586) | 4 | 0.3 | 0.0 |
| DR638(DR229-DR587) | 4099 | 292.8 | 13.4 |
| DR639(DR229-DR587) | 195 | 13.9 | 0.6 |
| DR640(DR229-DR589) | 279 | 19.9 | 0.9 |
| DR641(DR229-DR590) | 0 | 0.0 | 0.0 |
| DR642(DR230-DR214) | 85 | 6.1 | 0.3 |
| DR643(DR230-DR217) | 1149 | 82.1 | 3.8 |
| DR644(DR230-DR583) | 117 | 8.3 | 0.4 |
| DR645(DR230-DR584) | 15674 | 1119.6 | 51.2 |
| DR646(DR230-DR585) | 3 | 0.2 | 0.0 |
| DR647(DR230-DR586) | 2406 | 171.8 | 7.9 |
| DR648(DR230-DR587) | 1615 | 115.3 | 5.3 |
| DR649(DR230-DR588) | 3 | 0.2 | 0.0 |
| DR650(DR230-DR589) | 1 | 0.1 | 0.0 |
| DR651(DR230-DR590) | 2 | 0.2 | 0.0 |
| DR652(DR231-DR214) | 2139 | 152.8 | 7.0 |
| DR653(DR231-DR217) | 16 | 1.1 | 0.1 |
| DR654(DR231-DR583) | 1 | 0.0 | 0.0 |
| DR655(DR231-DR584) | 783 | 55.9 | 2.6 |
| DR656(DR231-DR585) | 17608 | 1257.7 | 57.5 |
| DR657(DR231-DR586) | 1 | 0.0 | 0.0 |
| DR658(DR231-DR587) | 2 | 0.2 | 0.0 |
| DR659(DR231-DR588) | 1 | 0.1 | 0.0 |
| DR660(DR231-DR589) | 1 | 0.1 | 0.0 |
| DR661(DR231-DR590) | 0 | 0.0 | 0.0 |
| DR662(DR232-DR214) | 0 | 0.0 | 0.0 |
| DR663(DR232-DR217) | 13 | 0.9 | 0.0 |
| DR664(DR232-DR583) | 2 | 0.2 | 0.0 |
| DR665(DR232-DR584) | 1 | 0.1 | 0.0 |
| DR666(DR232-DR585) | 1 | 0.1 | 0.0 |
| DR667(DR232-DR586) | 9 | 0.6 | 0.0 |
| DR668(DR232-DR587) | 1 | 0.1 | 0.0 |
| DR669(DR232-DR588) | 1 | 0.1 | 0.0 |
| DR670(DR232-DR589) | 1 | 0.1 | 0.0 |
| DR671(DR232-DR590) | 15 | 1.0 | 0.0 |
| DR672(DR233-DR214) | 21 | 1.5 | 0.1 |
| DR673(DR233-DR217) | 171 | 12.2 | 0.6 |
| DR674(DR233-DR583) | 226 | 16.1 | 0.7 |
| DR675(DR233-DR584) | 4157 | 296.9 | 13.6 |
| DR676(DR233-DR584) | 1 | 0.1 | 0.0 |
| DR677(DR233-DR586) | 14 | 1.0 | 0.0 |
| DR678(DR233-DR587) | 1850 | 132.1 | 6.0 |
| DR679(DR233-DR588) | 469 | 33.5 | 1.5 |
| DR680(DR233-DR589) | 207 | 14.8 | 0.7 |
| DR681(DR233-DR590) | 7 | 0.5 | 0.0 |
| DR682(DR234-DR214) | 123 | 8.8 | 0.4 |
| DR683(DR234-DR217) | 6 | 0.4 | 0.0 |
| DR684(DR234-DR583) | 3 | 0.2 | 0.0 |
| DR685(DR234-DR584) | 66 | 4.7 | 0.2 |
| DR686(DR234-DR585) | 1 | 0.1 | 0.0 |
| DR687(DR234-DR586) | 1 | 0.0 | 0.0 |
| DR688(DR234-DR587) | 50 | 3.6 | 0.2 |
| DR689(DR234-DR588) | 22 | 1.5 | 0.1 |
| DR690(DR234-DR589) | 5 | 0.3 | 0.0 |
| DR691(DR234-DR590) | 0 | 0.0 | 0.0 |
| DR692(DR214-DR229) | 2 | 0.2 | 0.0 |
| DR693(DR214-DR230) | 1 | 0.1 | 0.0 |
| DR694(DR214-DR231) | 0 | 0.0 | 0.0 |
| DR695(DR214-DR232) | 0 | 0.0 | 0.0 |
| DR696(DR214-DR233) | 2 | 0.1 | 0.0 |
| DR697(DR214-DR234) | 4 | 0.3 | 0.0 |
| DR698(DR217-DR229) | 1 | 0.1 | 0.0 |
| DR699(DR217-DR230) | 8 | 0.6 | 0.0 |
| DR700(DR217-DR231) | 2 | 0.2 | 0.0 |
| DR701(DR217-DR232) | 101 | 7.2 | 0.3 |
| DR702(DR217-DR233) | 2 | 0.1 | 0.0 |
| DR703(DR217-DR234) | 94 | 6.7 | 0.3 |
| DR704(DR583-DR229) | 9 | 0.7 | 0.0 |
| DR705(DR583-DR230) | 1 | 0.0 | 0.0 |
| DR706(DR583-DR231) | 1 | 0.1 | 0.0 |
| DR707(DR583-DR232) | 2 | 0.2 | 0.0 |
| DR708(DR583-DR233) | 1 | 0.1 | 0.0 |
| DR709(DR583-DR234) | 1 | 0.1 | 0.0 |
| DR710(DR584-DR229) | 0 | 0.0 | 0.0 |
| DR711(DR584-DR230) | 0 | 0.0 | 0.0 |
| DR712(DR584-DR231) | 0 | 0.0 | 0.0 |
| DR713(DR584-DR232) | 1 | 0.1 | 0.0 |
| DR714(DR584-DR233) | 0 | 0.1 | 0.0 |
| DR715(DR584-DR234) | 14 | 1.0 | 0.0 |
| DR716(DR585-DR229) | 106 | 7.5 | 0.3 |
| DR717(DR585-DR230) | 2574 | 183.8 | 8.4 |
| DR718(DR585-DR231) | 5621 | 401.5 | 18.4 |
| DR719(DR585-DR232) | 197 | 14.1 | 0.6 |
| DR720(DR585-DR233) | 60 | 4.3 | 0.2 |
| DR721(DR585-DR234) | 2433 | 173.8 | 7.9 |
| DR722(DR586-DR229) | 714 | 51.0 | 2.3 |
| DR723(DR586-DR230) | 9 | 0.6 | 0.0 |
| DR724(DR586-DR231) | 332 | 23.7 | 1.1 |
| DR725(DR586-DR232) | 2 | 0.1 | 0.0 |
| DR726(DR586-DR233) | 1 | 0.1 | 0.0 |
| DR727(DR586-DR234) | 2 | 0.1 | 0.0 |
| DR728(DR587-DR229) | 25 | 1.8 | 0.1 |
| DR729(DR587-DR230) | 2 | 0.1 | 0.0 |
| DR730(DR587-DR231) | 15 | 1.1 | 0.0 |
| DR731(DR587-DR232) | 2 | 0.2 | 0.0 |
| DR732(DR587-DR233) | 4 | 0.3 | 0.0 |
| DR733(DR587-DR234) | 6 | 0.4 | 0.0 |
| DR734(DR588-DR229) | 488 | 34.8 | 1.6 |
| DR735(DR588-DR230) | 55 | 3.9 | 0.2 |
| DR736(DR588-DR231) | 289 | 20.6 | 0.9 |
| DR737(DR588-DR232) | 88 | 6.3 | 0.3 |
| DR738(DR588-DR233) | 3 | 0.2 | 0.0 |
| DR739(DR588-DR234) | 78 | 5.6 | 0.3 |
| DR740(DR589-DR229) | 83 | 5.9 | 0.3 |
| DR741(DR589-DR230) | 56 | 4.0 | 0.2 |
| DR742(DR589-DR231) | 11 | 0.8 | 0.0 |
| DR743(DR589-DR232) | 1 | 0.1 | 0.0 |
| DR744(DR589-DR233) | 55 | 3.9 | 0.2 |
| DR745(DR589-DR234) | 1 | 0.1 | 0.0 |
| DR746(DR590-DR229) | 13 | 0.9 | 0.0 |
| DR747(DR590-DR230) | 249 | 17.8 | 0.8 |
| DR748(DR590-DR231) | 103 | 7.3 | 0.3 |
| DR749(DR590-DR232) | 30 | 2.1 | 0.1 |
| DR750(DR590-DR233) | 6 | 0.4 | 0.0 |
| DR751(DR590-DR234) | 1 | 0.1 | 0.0 |
| medium | 14 | 1.0 | 0.0 |
| IL2 | 30616 | 2186.9 | 100.0 |

TABLE 28
Cell populations in total PBMC cultured for
6 days with anti-IL2Rβ/γ V_{H}H²s

| | |
|---|---|
| D24 | D26 |

| | % T | % NK | % T | % NK |
|---|---|---|---|---|
| Construct | cells | Cells | cells | Cells |
| DR634(DR229-DR583) | 48.5 | 35.1 | 62.2 | 35.7 |
| DR635(DR229-DR584) | 47.8 | 50.4 | 51.6 | 46.2 |
| DR636(DR229-DR585) | 96.6 | 2.0 | 97.5 | 0.3 |
| DR638(DR229-DR587) | 42.0 | 55.8 | 50.7 | 47.2 |
| DR639(DR229-DR588) | 50.3 | 47.2 | 58.9 | 39.5 |
| DR642(DR230-DR214) | 42.7 | 55.4 | 59.0 | 39.3 |
| DR643(DR230-DR217) | 46.6 | 51.5 | 50.2 | 47.7 |
| DR644(DR230-DR583) | 62.9 | 33.7 | 77.5 | 20.0 |
| DR645(DR230-DR584) | 36.3 | 60.9 | 56.9 | 41.5 |
| DR647(DR230-DR586) | 46.0 | 52.0 | 51.6 | 46.4 |
| DR648(DR230-DR587) | 42.5 | 55.2 | 53.1 | 45.1 |
| DR652(DR231-DR214) | 44.5 | 53.5 | 49.7 | 48.0 |
| DR655(DR231-DR584) | 75.0 | 21.2 | 81.1 | 15.9 |
| DR656(DR231-DR585) | 38.8 | 59.0 | 55.4 | 43.0 |
| DR673(DR233-DR217) | 42.0 | 55.8 | 65.3 | 32.6 |
| DR674(DR233-DR583) | 38.7 | 59.4 | 61.5 | 36.3 |
| DR675(DR233-DR584) | 44.9 | 53.3 | 42.9 | 55.0 |
| DR678(DR233-DR587) | 46.6 | 51.5 | 53.5 | 44.5 |
| DR679(DR233-DR588) | 36.1 | 61.9 | 57.8 | 40.6 |
| DR680(DR233-DR589) | 46.2 | 52.1 | 63.8 | 34.2 |
| DR682(DR234-DR214) | 59.9 | 36.4 | 68.2 | 29.2 |
| DR688(DR234-DR587) | 40.0 | 57.9 | 59.0 | 38.6 |
| DR701(DR217-DR232) | 57.3 | 40.3 | 63.1 | 35.4 |
| DR714(DR584-DR233) | 93.0 | 4.0 | 95.4 | 2.3 |
| DR716(DR585-DR229) | 36.9 | 61.0 | 55.4 | 42.7 |
| DR717(DR585-DR230) | 48.3 | 49.3 | 45.6 | 51.9 |
| DR718(DR585-DR231) | 40.3 | 58.2 | 46.9 | 50.8 |
| DR719(DR585-DR232) | 38.3 | 59.7 | 88.9 | 6.1 |
| DR721(DR585-DR234) | 40.5 | 57.4 | 48.3 | 49.3 |
| DR722(DR586-DR229) | 45.2 | 53.0 | 52.0 | 46.4 |
| DR724(DR586-DR231) | 46.7 | 51.3 | 57.4 | 40.6 |
| DR736(DR588-DR231) | 41.4 | 56.8 | 55.4 | 42.1 |
| DR740(DR589-DR229) | 78.2 | 17.9 | 86.6 | 6.0 |
| DR741(DR589-DR230) | 79.8 | 17.0 | 84.2 | 9.8 |
| DR744(DR589-DR233) | 85.6 | 10.3 | 82.8 | 8.3 |
| DR747(DR590-DR230) | 41.2 | 56.2 | 68.1 | 29.4 |
| IL2 | 63.2 | 34.5 | 64.1 | 33.5 |

TABLE 29
T Cell populations in total PBMC cultured for
6 days with anti-IL2Rβ/γ V_{H}H²s

| | D24 T Cells | | D26 T Cells | |
|---|---|---|---|---|
| Construct | % CD4 | % CD8 | % CD4 | % CD8 |
| DR634(DR229-DR583) | 19.8 | 45.5 | 51.6 | 24.5 |
| DR635(DR229-DR584) | 42.4 | 18.2 | 47.6 | 26.7 |
| DR636(DR229-DR585) | 16.0 | 7.0 | 53.6 | 23.6 |
| DR638(DR229-DR587) | 42.3 | 16.0 | 48.9 | 27.5 |
| DR639(DR229-DR588) | 46.5 | 19.6 | 52.4 | 25.1 |
| DR642(DR230-DR214) | 45.7 | 19.1 | 45.0 | 33.9 |
| DR643(DR230-DR217) | 52.0 | 17.6 | 50.1 | 25.4 |
| DR644(DR230-DR583) | 46.7 | 16.1 | 54.8 | 20.2 |
| DR645(DR230-DR584) | 42.4 | 24.4 | 42.6 | 34.0 |
| DR647(DR230-DR586) | 49.0 | 20.6 | 52.5 | 24.8 |
| DR648(DR230-DR587) | 45.6 | 23.7 | 45.2 | 31.4 |
| DR652(DR231-DR214) | 43.9 | 26.0 | 40.8 | 27.1 |
| DR655(DR231-DR584) | 46.1 | 16.2 | 50.7 | 20.1 |
| DR656(DR231-DR585) | 46.9 | 14.7 | 44.1 | 26.0 |
| DR673(DR233-DR217) | 46.3 | 17.5 | 52.8 | 22.7 |
| DR674(DR233-DR583) | 42.7 | 24.5 | 46.3 | 27.1 |
| DR675(DR233-DR584) | 43.9 | 19.5 | 46.6 | 32.1 |
| DR678(DR233-DR587) | 44.2 | 18.0 | 48.0 | 29.2 |
| DR679(DR233-DR588) | 43.3 | 18.1 | 42.8 | 28.1 |
| DR680(DR233-DR589) | 50.4 | 17.3 | 52.2 | 27.0 |
| DR682(DR234-DR214) | 40.0 | 22.3 | 50.1 | 27.1 |
| DR688(DR234-DR587) | 38.2 | 22.6 | 41.8 | 31.9 |
| DR701(DR217-DR232) | 49.5 | 19.7 | 49.1 | 27.8 |
| DR714(DR584-DR233) | 44.2 | 14.8 | 53.4 | 22.9 |
| DR716(DR585-DR229) | 41.5 | 19.5 | 46.2 | 25.0 |
| DR717(DR585-DR230) | 46.7 | 19.0 | 45.9 | 27.6 |
| DR718(DR585-DR231) | 45.7 | 24.1 | 47.1 | 31.2 |
| DR719(DR585-DR232) | 48.7 | 16.4 | 51.3 | 21.1 |
| DR721(DR585-DR234) | 46.1 | 21.4 | 40.4 | 30.0 |
| DR722(DR586-DR229) | 50.1 | 19.7 | 46.4 | 31.7 |
| DR724(DR586-DR231) | 42.5 | 21.6 | 44.2 | 31.0 |
| DR736(DR588-DR231) | 51.3 | 14.6 | 40.9 | 31.4 |
| DR740(DR589-DR229) | 35.1 | 20.3 | 37.5 | 28.7 |
| DR741(DR589-DR230) | 39.5 | 20.2 | 39.8 | 22.2 |
| DR744(DR589-DR233) | 32.3 | 20.7 | 39.7 | 25.1 |
| DR747(DR590-DR230) | 41.0 | 20.1 | 40.4 | 26.0 |
| IL2 | 41.1 | 14.4 | 41.7 | 13.1 |

### Example 18 Generation of PEGylated DR638 and DR736

[0612] DNA coding for DR638 and DR736 dual VHH fused to a 6x-histidine tag (SEQ ID NO: 127) was transfected into suspension Expi293 cells using Expi-Fectamine according to manufacturer's instructions (ThermoFisher). After six days of cell culture, supernatant was harvested and sterile-filtered. Purification was achieved via affinity chromatography on Ni-Excel resin (Cytiva) after addition of 5 mM imidazole in the protein supe. Wash and elution were carried out in PBS buffer supplemented with 30 and 250 mM imidazole, respectively.

[0613] pH of the eluates was reduced to ˜6.3 via addition of glacial acetate (100× dilution). PEGylation was then triggered by addition of 40 KDa, branched polyethylene glycol (PEG, Nof Corporation) in a 20× weight to weight ratio over protein, followed by addition of 10 mM Sodium Cyanoborohydride. The reaction was incubated for 20 h at room temperature. Isolation of mono-pegylated, dual VHH was achieved by cationic exchange chromatography over an SP FF, 20 mL column (Cytiva). The reaction was diluted three-fold in water to reduce the conductivity under 7.5 mS/cm and then loaded on the column. A 10-500 mM linear gradient of NaCl in 20 mM sodium acetate, pH 5, 2% sucrose, 1 mM EDTA was used to elute and separate protein conjugated to 2, 1 and 0 PEG molecules. Analytical SEC was used to determine the purity of the mono PEGylated final products: 88.2% DR638-PEG40K2a and 87.4% DR736-PEG40K2a. Integrity, identity, in vitro activity and thermo-stability of the molecules were validated via SDS-PAGE, LCMS, Biacore and Nanotemper Panta assays.

### Example 19. Evaluation of PEGylated and Non-PEGylated DR638 and DR736 By Surface Plasmon Resonance

[0614] The affinity of the non-PEGylated and the PEGylated forms of DR638 and DR736 prepared in substantial accordance with the foregoing were evaluated by surface plasmon resonance with the VHH dimer molecule in the mobile phase and an immobilized Fc fused hCD122 and hCD132 monovalent and bivalent hCD122/hCD132 Fc construct. DR638 exhibited an affinity for hCD122 of less than 0.5 nM and for CD132 of approximately 0.5 nM with an avidity for the hCD/122/CD132 dimeric receptor of less than 0.5 nM. When PEGylated with the 40 kD PEG molecule there was a reduction in affinity for the IL2 receptor subunits, resulting an affinity for hCD122 of approximately 1.1 nM and for hCD132 of approximately 16.3 nM. With respect to DR736, affinity for CD122 of approximately 21 nM and for CD132 of approximately 6.5 nM with an avidity for the hCD122/hCD132 dimeric receptor of approximately 0.2 nM. Similarly, with respect to DR 736, the 40 kD PEG molecule resulted in a reduction in affinity for the hIL2 receptor subunits that was not detectable under the conditions evaluated.

### Example 20. Evaluation of PEGylated and Non-PEGylated DR638 and DR736 On Mouse Splenocytes

[0615] The DR638 and DR736 constructs were evaluated for activity in both PEGylated and non-PEGylated forms on mouse splenocytes. Mouse splenocytes were cultured with mouse anti-CD3/CD28 beads and IL-2 for 3 days, stimulated for 48 hours, and the activation evaluated using the CellTiter-Glo assay as described above. The component VHHs of each dimeric construct were generated by immunization with the human receptor ECD resulting in a low activity of the DR638 molecule on mouse splenocytes relative to PEG-neoleukin and human IL2 with the PEGylated form exhibiting even lower activity. With respect to DR736 there was essentially no detectable cross reactivity in either the PEGylated or non-PEGylated forms. A three-day culture of activated C57/BH mouse splenocytes neither the PEGylated or non-PEGylated forms of DR638 or DR736 demonstrated no detectable proliferation nor significant STAT5 signaling or IFN-gamma production (evaluated in substantial accordance with the foregoing assay methodologies) confirming that neither DR638 nor DR736 cross-react to a significant degree with the mouse CD122/CD132 intermediate affinity receptor.

### Example 21. Evaluation of PEGylated and Non-PEGylated DR638 and DR736 In Vivo

[0616] Since neither DR638 nor DR736 cross react with the murine CD122, CD132 or intermediate affinity murine IL2 receptor to a significant degree, to evaluate the effects of DR638 and DR736 constructs in vivo, these molecules were evaluated in double transgenic mouse model that expressed the human CD122 and CD132 receptors. hIL2Rβ/hIL2Rγ double transgenic mice (dtg) were generated and obtained from Biocytogen corporation (Boston). The mice were generated by replacement of exons 2-8 of mouse CD122 gene that encode the extracellular domain of mCD122 with hCD122 exons 2-8 and exons 1-8 of mouse CD132 gene that encode the full-length protein mCD132 were replaced by hCD132 exons 2-8. Mice are hemizygous and express both human and mouse IL2Rβ and IL2Rγ. The individual mouse lines were crossed to generate chimeric CD122/CD132 double transgenic mice. Wildtype C57/Bl 6 mice expressing only mouse IL2Rβ and IL2Rγ were used as control. As a comparator, the neoleukin (“Neo-2/1”5) molecule was employed. Neo-2/15, as described in Silva, et al. (2019) Nature 565:186 is a synthetic IL2/IL15 molecule that specifically binds to the CD122 and CD132 receptors but has no binding site for CD25 such that it is a ligand only for the dimeric intermediate affinity IL2 receptor. The 40 kd PEGylated neoleukin molecule (neoleukin-PEG) was generated in substantial accordance with the foregoing PEGylation protocol. The IL2Rβ/γ VHH dimer DR638 has approximately 10-100 fold higher activity relative to the IL2Rβ/γ VHH dimer DR736 in the biological assays described in examples 1-10.

[0617] The 40Kd PEGylated forms of DR638 (DR638peg) DR 736 (DR736peg) were dosed in hIL2Rβ/hIL2Rγ dtg mice as follows. DR638peg was dosed subcutaneously once at 250 mg/mouse, 40 mg/mouse, and 10 mg/mouse, and twice per week for 2 weeks for a total of 4 doses at 1 mg/mouse and 0.1 mg/mouse. DR736peg was dosed subcutaneously twice per week for 2 weeks for a total of 4 doses at 200 mg/mouse. Neoleukin-peg was dosed once at 3 mg/mouse and once per week for 2 weeks for a total of 2 doses at 1 mg/mouse. Wildtype C57/B16 mice were dosed with anti-IL2Rβ/γ V_{H}H²'s DR638peg twice per week for 2 weeks for a total of 4 doses at 10 mg/mouse and once per week for 2 weeks for a total of 2 doses at 1 mg/mouse. Each dose group consisted of 4-5 mice per group. Mice were bled on days 7 and 14 and the surviving mice were sacrificed on day 14.

[0618] Blood and spleens were harvested from hIL2Rβ/hIL2Rγ dtg mice and wildtype C57/B16 mice when sacrificed either when moribund or after completion of treatment for FACS analyses. Blood and spleen cell suspensions were phenotyped for CD3, CD4, CD8a, CD11b, CD19, CD90.2, CD45, CD25, CD122, CD132, hCD122, hCD132, NK1.1, TCRgd, K167, FoxP3 and Granzyme B expression. Cells were washed in PBS and incubated in PBS with 1/3000 dilution of fix viability dye ZombiNIR for 15 min on ice and quenched in FACS buffer consisting of PBS, 2 mM EDTA, 0.5% BSA. Cells were washed and fixed with BD lyse fix buffer for 10 min, washed in FACS buffer twice and permeabilized with chilled BD Perm Buffer III for 30 minutes on ice. Cells were washed twice in FACS buffer, resuspended in 1:200 Fc-Block (#1) and stained with CD3 APC Fire 810, CD4 BV480, CD8a BV570, CD11b Pacific Blue, CD19 BV605, CD90.2 BV510, CD45 AF532, CD25 AF647, CD122 PE-Cy7, CD132 BV421, hCD122 PE, hCD132 APC, NK1.1BV711, TCRgd BV650, K167 BV786, FoxP3PerCP-eFluor 710 and Granzyme B FITC antibody-conjugates (All Biolegend) according to manufacturer's recommendation for 30 min on ice. Cells were washed, fixed with 0.1% paraformaldehyde and analyzed on an Aurora Flow Cytometer (Cytek) with SpectroFlo software. Immunohistochemistry evaluations of major orgrans (spleen, liver lung and intestine) was performed. The data generated in this study with respect to the various cell populations and functional markers from both blood and spleen are presented in FIGS. 9-15 of the attached drawings. The data from these experiments is presented in the following tables.

Cell populations in blood of hIL2Rβ/hIL2Rγ dtg and WT BL/6 mice
following administration of anti-IL2Rβ/γ V_{H}H² DR638peg, DR736peg or NeoleukinPEG.

| | | | | | | | Avg % | | Avg % | Avg % |
|---|---|---|---|---|---|---|---|---|---|---|
| | Mouse | Treatment | | Avg % | Avg % | Avg % | NK1.1+ | Avg % | CD4+ | CD8+ |
| Sex | Model | Group/Dose | Day | B cells | Mo/Gran | NK cells | T cells | T cells | T cells | T cells |
| M | dtg | PBS | 14 | 64.06 | 15.59 | 1.27 | 0.65 | 9.8 | 2.52 | 6.11 |
| M | dtg | DR638peg | 4 | 1.99 | 23.55 | 6.29 | 45.77 | 7.5 | 2.28 | 12.64 |
| | | 40 ug | | | | | | | | |
| M | dtg | DR638peg | 4 | 2.37 | 31.64 | 3.87 | 41.87 | 7.39 | 1.42 | 11.44 |
| | | 250 ug | | | | | | | | |
| M | dtg | DR736peg | 14 | 9.48 | 32.55 | 21.58 | 16.66 | 8.09 | 0.62 | 11.02 |
| | | 200 ug | | | | | | | | |
| M | dtg | Neoleukin | 4 | 3.15 | 29.72 | 4.26 | 36.8 | 7.45 | 2.33 | 16.29 |
| | | peg 3 ug | | | | | | | | |
| F | dtg | PBS | 14 | 48.78 | 6.25 | 1.2 | 11.25 | 18.11 | 6.95 | 7.35 |
| F | dtg | DR638peg | 7 | 7.2 | 23.7 | 24.76 | 35.82 | 4.51 | 1.79 | 1.92 |
| | | 10 ug | | | | | | | | |
| F | dtg | DR638peg | 14 | 29.69 | 13.69 | 3.14 | 22.75 | 14.86 | 7.51 | 8.29 |
| | | 1 ug | | | | | | | | |
| F | dtg | DR638peg | 14 | 47.1 | 6.32 | 1.65 | 8.71 | 19.14 | 8.81 | 8.16 |
| | | 0.1 ug | | | | | | | | |
| F | dtg | Neoleukin | 14 | 38.62 | 6.29 | 0.88 | 9.46 | 25.64 | 9.58 | 9.43 |
| | | peg 1 ug | | | | | | | | |
| F | WT | PBS | 14 | 47.65 | 5.13 | 1.07 | 8.03 | 22.67 | 8.02 | 7.25 |
| | BL/6 | | | | | | | | | |
| F | WT | DR638peg | 14 | 52.05 | 5.71 | 0.86 | 8.42 | 21.57 | 5.58 | 5.61 |
| | BL/6 | 10 ug | | | | | | | | |
| F | WT | Neoleukin | 14 | 42.47 | 9 | 1.66 | 14.43 | 19.3 | 5.7 | 7.27 |
| | BL/6 | peg 1 ug | | | | | | | | |

M = Male,
F = Female
Dtg = hIL2Rβ/hIL2Rγ double transgenic mouse;
WT BL/6 = wild type BL/6 mouse
Avg %: Average values of 4-5 individual mice per group.

Cell populations in spleen of hIL2Rβ/hIL2Rγ dtg and WT BL/6 mice
following administration of anti-IL2Rβ/γ V_{H}H² DR638peg, DR736peg, or Neoleukin.

| | | | | | | | Avg % | | Avg % | Avg % |
|---|---|---|---|---|---|---|---|---|---|---|
| | Mouse | Treatment | | Avg % | Avg % | Avg % | NK1.1+ | Avg % | CD4+ | CD8+ |
| Sex | Model | Group | Day | B cells | Mo/Gran | NK cells | T cells | T cells | T cells | T cells |
| M | dtg | PBS | 14 | 64.98 | 4.03 | 0.83 | 0.92 | 14.55 | 8.6 | 6.08 |
| M | dtg | DR638peg | 4 | 17.27 | 7.8 | 1.77 | 32.22 | 15.83 | 2.99 | 22.12 |
| | | 40 ug | | | | | | | | |
| M | dtg | DR638peg | 4 | 20.91 | 9.87 | 1.06 | 26.85 | 14.4 | 2.46 | 24.46 |
| | | 250 ug | | | | | | | | |
| M | dtg | DR736peg | 14 | 25.87 | 13.88 | 8.6 | 10.97 | 18.69 | 2.38 | 19.6 |
| | | 200 ug | | | | | | | | |
| M | dtg | Neoleukin | 4 | 51.55 | 0.36 | 0.7 | 13.34 | 14.63 | 4.33 | 15.09 |
| | | peg 3 ug | | | | | | | | |
| F | dtg | PBS | 14 | 49.26 | 2.99 | 1.68 | 10.64 | 21.94 | 8.37 | 4.91 |
| F | dtg | DR638peg | 7 | 18.2 | 7.11 | 7.9 | 59.94 | 2.56 | 1.67 | 0.81 |
| | | 10 ug | | | | | | | | |
| F | dtg | DR638peg | 14 | 45.16 | 5.23 | 1.73 | 14.65 | 18.66 | 8.69 | 5.67 |
| | | 1 ug | | | | | | | | |
| F | dtg | DR638peg | 14 | 52.05 | 2.51 | 1.46 | 9.28 | 19.03 | 9.85 | 5.59 |
| | | 0.1 ug | | | | | | | | |
| F | dtg | Neoleukin | 14 | 46.65 | 3.65 | 0.74 | 7.71 | 25.08 | 9.82 | 6.02 |
| | | peg 1 ug | | | | | | | | |
| F | WT | PBS | 14 | 31.67 | 2.1 | 3.63 | 35.94 | 14.91 | 6.7 | 4.68 |
| | BL/6 | | | | | | | | | |
| F | WT | DR638peg | 14 | 50.73 | 1.87 | 2.71 | 7.28 | 21.97 | 9.14 | 6.06 |
| | BL/6 | 10 ug | | | | | | | | |
| F | WT | Neoleukin | 14 | 52.07 | 2.63 | 1.17 | 7.59 | 21.33 | 8.75 | 6.16 |
| | BL/6 | peg 1 ug | | | | | | | | |

M = Male,
F = Female
Dtg = hIL2Rβ/hIL2Rγ double transgenic mouse;
WT BL/6 = wild type BL/6 mouse
Avg %: Average values of 4-5 individual mice per group.

[0619] hIL2Rβ/hIL2Rγ dtg mice dosed with DR638peg at 250 mg/mouse, 40 mg/mouse, and 10 mg/mouse were moribund on days 4, 5, and 7 respectively following dosing and had to be sacrificed. hIL2Rβ/hIL2Rγ dtg mice dosed with Neoleukin-peg at 3 mg/mouse were moribund on day 6 following dosing and had to be sacrificed. hIL2Rβ/hIL2Rγ mice and wildtype C57/B16 mice dosed with DR638peg at 1 mg/mouse, Neoleukin-peg at 1 mg/mouse and PBS controls as well as hIL2R43/hIL2Rγ mice dosed with DR638peg at 0.1 mg/mouse and DR736peg at 200 mg/mouse survived the dosing regimen. These results indicate that high doses of DR638peg affect physiology and induce lethality in hIL2Rβ/hIL2Rγ dtg mice similar to the hIL2Rβ/hIL2Rγ biased IL-2 agonist Neoleukin. The induced lethality of DR638peg is dose dependent, and specific for mice that express hIL2Rβ/hIL2Rγ as wildtype C57/B16 mice survived treatment.

[0620] Administration of DR638peg and DR736peg and Neoleukin induced significant changes in cell populations in blood and spleen in vivo in hIL2Rβ/hIL2Rγ dtg mice expressing hIL2Rβ and hIL2Rγ. The DR638peg induced a large population of NK1.1 positive T cells in blood and spleen in a dose dependent manner, similar to Neoleukin. Most of these cells were CD8 positive. The DR638peg and Neoleukin also increased the population of NK1.1 negative T cells. Concurrently the percentages of B cells were greatly reduced and there was a modest increase in myeloid/granulocyte populations. The DR736peg showed also modest increases in NK1.1 positive T cells, NK1.1 negative CD T cells and myeloid/granulocyte populations and also in NK cells in hIL2Rβ/hIL2Rγ dtg mice. The DR638peg had no effect on any of the subpopulations in wildtype C57Bl/6 mice that do not express hIL2Rβ and hIL2Rγ. Neoleukin, which can cross species did slightly increase the population of NK1.1 positive T cells in blood of wildtype C57Bl/6 mice. In addition, DR638peg and DR736 and Neoleukin induced proliferation and activation, of CD4 positive T cells, CD8 positive T cells and NK1.1 positive T cells as evidenced by increased expression of the proliferation market Ki67 and activation marker Granzyme B. In these experiments the anti-IL2Rβ/γ V_{H}H²'s DR638 and DR736 induced T cell activation, proliferation and changes in blood and spleen subpopulations in vivo in mice expressing hIL2Rβ and hIL2Rγ. Similar to Neoleukin, DR638 had a maximum tolerable dose.

[0621] It is understood that the examples and embodiments described herein are for illustrative purposes only and that various modifications or changes in light thereof will be suggested to persons skilled in the art and are to be included within the spirit and purview of this application and scope of the appended claims. All publications, sequence accession numbers, patents, and patent applications cited herein are hereby incorporated by reference.

### TABLES

TABLE 30
anti-human IL2Rb sdAb CDRs

| | CDR 1 | | | | | |
|---|---|---|---|---|---|---|
| | (Chothia/ | | | | | |
| Name of VHH | Kabat) | SEQ ID NO: | CDR 2 | SEQ ID NO: | CDR 3 | SEQ ID NO: |
| hIL2Rb VHH- | YTYDTSDMS | 426 | DIDSGDWAA | 427 | SYWKWGKL | 428 |
| 1 | | | YADAVKG | | NNF | |
| hIL2Rb VHH- | FTFSNYWIF | 429 | TSNTGGDTT | 430 | GRCARSG | 431 |
| 2 | | | KYADSVKG | | | |
| hIL2Rb VHH- | FRFSNYGMS | 432 | YINGDGSRT | 433 | GLSRDGWSL | 434 |
| 3 | | | HYADSVKG | | SAAS | |
| hIL2Rb_VHH- | YTTYSFNYM | 435 | VIYTGGGSTL | 436 | DDQRFASPL | 437 |
| 4 | G | | YADSVKG | | YAYFGY | |
| hIL2Rb VHH- | DTKSIRCMG | 1438 | AIDREGFAT | 439 | QNMCRVVR | 440 |
| 5 | | | YADSVYD | | GAMTGVDY | |
| hIL2Rb VHH- | YTASRYCMA | 441 | AIHPGGGTT | 442 | GSLWVPFGD | 443 |
| 6 | | | YYADSVKG | | RCAANY | |
| hIL2Rb VHH- | YEYCRIHMT | 444 | SIGSDGRKTY | 445 | EYLYGLGCP | 446 |
| 7 | | | ANSVTG | | DGSAY | |
| hIL2Rb_VHH- | YTYSSYYCM | 447 | AIDSDGSTSY | 448 | SYEVVDCYP | 449 |
| 8 | G | | ADSVKG | | SGYGQDY | |

TABLE 31
murine IL2Rb sdAb CDRs

| | CDR1 | SEQ ID | | | | |
|---|---|---|---|---|---|---|
| Name | (Chothia/Kabat) | NO: | CDR2 | SEQ ID NO: | CDR3 | SEQ ID NO: |
| [symbol] | [symbol] | 450 | [symbol] | 451 | [symbol] | 452 |
| [symbol] | [symbol] | 453 | [symbol] | 454 | [symbol] | 455 |
| | | | | | [symbol] | |
| [symbol] | [symbol] | 456 | [symbol] | 457 | [symbol] | 458 |
| [symbol] | [symbol] | 459 | [symbol] | 460 | [symbol] | 461 |
| [symbol] | [symbol] | 462 | [symbol] | 463 | [symbol] | 464 |
| [symbol] | [symbol] | 465 | [symbol] | 466 | [symbol] | 467 |
| [symbol] | [symbol] | 468 | [symbol] | 469 | [symbol] | 470 |
| [symbol] | [symbol] | 471 | [symbol] | 472 | [symbol] | 473 |
| [symbol] | [symbol] | 474 | [symbol] | 475 | [symbol] | 476 |
| [symbol] | [symbol] | 477 | [symbol] | 478 | [symbol] | 479 |
| [symbol] | [symbol] | 480 | [symbol] | 481 | [symbol] | 482 |
| [symbol] | [symbol] | 483 | [symbol] | 484 | [symbol] | 485 |
| [symbol] | [symbol] | 486 | [symbol] | 487 | [symbol] | 488 |
| [symbol] | [symbol] | 489 | [symbol] | 490 | [symbol] | 491 |
| [symbol] | [symbol] | 492 | [symbol] | 493 | [symbol] | 494 |
| [symbol] | [symbol] | 495 | [symbol] | 496 | [symbol] | 497 |
| [symbol] | [symbol] | 498 | [symbol] | 499 | [symbol] | 500 |
| [symbol] | [symbol] | 501 | [symbol] | 502 | [symbol] | 503 |
| [symbol] | [symbol] | 504 | [symbol] | 505 | [symbol] | 506 |
| [symbol] | [symbol] | 507 | [symbol] | 508 | [symbol] | 509 |
| [symbol] | [symbol] | 510 | [symbol] | 511 | [symbol] | 512 |
| [symbol] | [symbol] | 513 | [symbol] | 514 | [symbol] | 515 |
| [symbol] | [symbol] | 516 | [symbol] | 517 | [symbol] | 518 |
| [symbol] | [symbol] | 519 | [symbol] | 520 | [symbol] | 521 |
| [symbol] | [symbol] | 522 | [symbol] | 523 | [symbol] | 524 |
| [symbol] | [symbol] | 525 | [symbol] | 526 | [symbol] | 527 |

[symbol]

indicates data missing or illegible when filed

TABLE 32
human IL2Rg sdAb CDRs

| | CDR1 | SEQ ID | | | | |
|---|---|---|---|---|---|---|
| Name | (Chothia/Kabat)) | NO: | CDR2 | SEQ ID NO: | CDR3 | SEQ ID NO: |
| hIL2Rg_VHH-1 | FTFDDSDMG | 528 | TISSDGSTYYADSVKG | 529 | DFMIAIQAPGAGC | 530 |
| hIL2Rg_VHH-2 | FSFSSYPMT | 531 | TIASDGGSTAYAASVE | 532 | GYGDGTPA | 533 |
| | | | G | | | |
| hIL2Rg_VHH-3 | FTFDDREMN | 534 | TISSDGSTYYADSVKG | 535 | DFMIAIQAPGAGC | 536 |
| hIL2Rg_VHH-4 | FTFDDSDMG | 537 | TISSDGNTYYTDSVKG | 538 | EPRGYYSNYGGRR | 539 |
| | | | | | ECNY | |
| hIL2Rg_VHH-5 | FSFSSYPMT | 540 | TIASDGGSTAYAASVE | 541 | GYGDGTPA | 542 |
| | | | G | | | |
| hIL2Rg_VHH-6 | FTFSNAHMS | 543 | SIYSGGSTWYADSVKG | 544 | NRLHYYSDDDSL | 545 |
| hIL2Rg_VHH-7 | FTFDDREMN | 546 | TISSDGSIYYADSVKG | 547 | DFMIAIQAPGAGC | 548 |
| hIL2Rg_VHH-8 | YTFSSYCMG | 549 | ALGGGSTYYADSVKG | 550 | AWVACLEFGGSWY | 551 |
| | | | | | DLARYKH | |
| hIL2Rg_VHH-9 | FTFDDSDMG | 552 | TISSDGSIYYADSVKG | 553 | EPRGYYSNYGGRR | 554 |
| | | | | | ECNY | |
| hIL2Rg_VHH- | SIYSSAYIG | 555 | GIYTRDGSTAYADSVK | 556 | GRRTKSYVYIFRPE | 557 |
| 10 | | | G | | EYNY | |
| hIL2Rg_VHH- | FTFSSAHMS | 558 | SIYSGGGTFYADSVKG | 559 | NRLHYYSDDDSL | 560 |
| 11 | | | | | | |
| hIL2Rg_VHH- | FTFSNAHMS | 561 | SIYSGGSTWYADSVKG | 562 | NRLHYYSDDDSL | 563 |
| 12 | | | | | | |
| hIL2Rg_VHH- | FIFDDSDMG | 564 | TISSDGSIYYADSVKG | 565 | EPRGYYSNYGGRR | 566 |
| 13 | | | | | ECNY | |
| hIL2Rg_VHH- | FTADDSDMG | 567 | TISSDGSTYYADSVKG | 568 | EPRGYYSNYGGRR | 569 |
| 14 | | | | | ECNY | |
| hIL2Rg_VHH- | FTFSSAHMS | 570 | SIYSGGGTFYADSVKG | 571 | NRLHYYSDDDSL | 572 |
| 15 | | | | | | |
| hIL2Rg_VHH- | FTFSNAHMS | 573 | SIYSGGSTWYADSVKG | 574 | NRLHYYSDDDSL | 575 |
| 16 | | | | | | |
| hIL2Rg_VHH- | FTFSNAHMS | 576 | SIYSGGSTWYADSVKG | 577 | NRLHYYSDDDSL | 578 |
| 17 | | | | | | |
| hIL2Rg_VHH- | FTFSSYPMT | 579 | TIASDGGSTAYAASVE | 580 | GYGDGTPA | 581 |
| 18 | | | G | | | |
| hIL2Rg_VHH- | FTFDDREMN | 582 | TISSDGSIYYADSVKG | 583 | DFMIAIQAPGAGC | 584 |
| 19 | | | | | | |
| hIL2Rg_VHH- | FTFDDSDMG | 585 | TISSDGSIYYADSVKG | 586 | EPRGYYSNYGGRR | 587 |
| 20 | | | | | ECNY | |
| hIL2Rg_VHH- | YTSCMG | 588 | TIYTRGRSIYYADSVK | 589 | GGYSWSAGCEFNY | 590 |
| 21 | | | G | | | |
| hIL2Rg_VHH- | FSFSSYPMT | 591 | TIASDGGSTAYAASVE | 592 | GYGDGTPA | 593 |
| 22 | | | G | | | |
| hIL2Rg_VHH- | FSFSSYPMT | 594 | TIASDGGSTAYAASVE | 595 | GYGDGTPA | 596 |
| 23 | | | G | | | |

TABLE 33
mouse IL2Rg sdAb CDRs

| | CDR 1 | SEQ ID | | SEQ ID | | |
|---|---|---|---|---|---|---|
| Name | (Chothia/Kabat) | NO: | CDR 2 | NO: | CDR 3 | SEQ ID NO: |
| DR604 | YGYNYIG | 597 | VIYTGGGDTYYAD | 598 | SVYACLRGGHDE | 599 |
| | | | SVKG | | YAH | |
| mIL2Rg_ | STYANYLMG | 600 | AIYSGGGSTYYAD | 601 | ASAVKGDKGDIV | 602 |
| VHH2 | | | SVKG | | VVVTGTQRMEYD | |
| | | | | | Y | |
| mIL2Rg_ | FTFDESVMS | 603 | IISSDDNTYYDDSV | 604 | RRRRPVYDSDYEL | 605 |
| VHH3 | | | KG | | RPRPLCGDFGV | |
| mIL2Rg_ | LPFDEDDMG | 606 | SISSDGTAYYADS | 607 | GVHRQFGGSSSCG | 608 |
| VHH4 | | | VKG | | DAFYGMDY | |
| mIL2Rg_ | DVYGRNSMA | 609 | VGYSVVTTTYYA | 610 | DGNLWRGLRPSE | 611 |
| VHH5 | | | DSVKG | | YTY | |
| mIL2Rg_ | FPYSRYCMG | 612 | AIEPDGSTSYADS | 613 | DERCFYLKDYDLR | 614 |
| VHH6 | | | VKG | | RPAQYRY | |
| mIL2Rg_ | FTFDESDMG | 615 | VITSDDNPYYDDS | 616 | RSRQPVYSRDYEL | 617 |
| VHH7 | | | VKG | | RPRPLCGDFGV | |
| mIL2Rg_ | FTFDDFDMG | 618 | TISDDGSTYYADS | 619 | EGALGSKTNCGW | 620 |
| VHH8 | | | VKG | | VGNFGY | |
| mIL2Rg_ | FTFDDFDMG | 621 | TISDDGSTYYADS | 622 | EGALGSKTNCGW | 623 |
| VHH9 | | | VKG | | VGNFGY | |
| mIL2Rg_ | FTFDDFDMG | 624 | TISDDGSTYYADS | 625 | EGALGSKTNCGW | 626 |
| VHH10 | | | VKG | | VGNFGY | |
| mIL2Rg_ | FTFSDRDMG | 627 | TISDDGSTYYADS | 628 | EGALGSKTNCGW | 629 |
| VHH11 | | | VKG | | VGNFGY | |
| mIL2Rg_ | YGYNYIG | 630 | VIYIGGGDTYYAD | 631 | RYCVGSVYACLR | 632 |
| VHH12 | | | SVKG | | GGHDEYAH | |
| mIL2Rg_ | YGYNYIG | 633 | VIYTGGGDTYYAD | 634 | RYCVGSVYACLR | 635 |
| VHH13 | | | SVKG | | GGHDEYAH | |
| mIL2Rg_ | FTFDDFDMG | 636 | TISDDGSTYYANS | 637 | EGALGSKTNCGW | 638 |
| VHH14 | | | VKG | | VGNFGY | |
| mIL2Rg_ | FTFDDFDMG | 639 | TISDDGSTYYADS | 640 | EGALGSKMNCGW | 641 |
| VHH15 | | | VKG | | VGNFGY | |

TABLE 34
human anti-IL2Rb VHH Amino Acid Sequences

| Name | VHH Sequence | SEQ ID NO: |
|---|---|---|
| hIL2Rb_ | QVQLQESGGGSVQAGGSLRLSC | 642 |
| VHH-1 | VGSGYTYDTSDMSWYRQAPGKEREFVS | |
| | DIDSGDWAAYADAVKGRFTISRDNAKK | |
| | TVYLQMNSLEPEDTAMYYCKASYWKW | |
| | GKLNNFWGPGTQVTVSS | |
| hIL2Rb_ | QVQLQESGGGLVQPGGSLRLSCV | 643 |
| VHH-2 | ASGFTFSNYWIFWVRQAAGKGLEWLST | |
| | SNTGGDTTKYADSVKGRFTISRDSAKNT | |
| | EYLQMNSLKPEDTAVYYCETGRCARSG | |
| | GYQGTQVTVSS | |
| hIL2Rb_ | QVQLQESGGGLVQPGGSLKLSCA | 644 |
| VHH-3 | ASGFRFSNYGMSWVRQAPGEGLEWVSY | |
| | INGDGSRTHYADSVKGRFTISRDNAKNT | |
| | LYLQLNSLKTEDTAMYYCEKGLSRDGW | |
| | SLSAASRGQGTQVTVSS | |
| hIL2Rb_ | QVQLQESGGGSVQTGGSLRLSCA | 645 |
| VHH-4 | VSGYTTYSFNYMGWFRQAPGKEREGVA | |
| | VIYTGGGSTLYADSVKGRFTISQDNAKN | |
| | TVYLQMNSLKPEDTAMYYCAADDQRF | |
| | ASPLYAYFGYWGQGTQVTVSS | |
| hIL2Rb_ | QVQLQESGGGSVQVGGSLRLSC | 646 |
| VHH-5 | ATSGDTKSIRCMGWFRQTPGKEREGIAA | |
| | IDREGFATYADSVYDRFTIAQDNAQNTL | |
| | YLEMNALKPEDTAMYYCAAQNMCRVV | |
| | RGAMTGVDYWGKGTQVTVSS | |
| hIL2Rb_ | QVQLQESGGGSVQAGGSLRLSC | 647 |
| VHH-6 | AASEYTASRYCMAWFRQAPGKEREGVA | |
| | AIHPGGGTTYYADSVKGRFSISQDSADN | |
| | TLYLQMNSLKPEDTAMYYCAAGSLWVP | |
| | FGDRCAANYWGQGTQVTVSS | |
| hIL2Rb_ | QVQLQESGGGSVQAGGSLRLSC | 648 |
| VHH-7 | AASGYEYCRIHMTWYRQGPGKEREFVS | |
| | SIGSDGRKTYANSVTGRFTISRDNANHT | |
| | VYLQMNSLSPEDTAMYYCKTEYLYGLG | |
| | CPDGSAYWGQGTQVTVSS | |
| hIL2Rb_ | QVQLQESGGGSVQVGGSLKLSC | 649 |
| VHH-8 | AASGYTYSSYYCMGWFRQAPGKEREGV | |
| | AAIDSDGSTSYADSVKGRFTISQDDAKN | |
| | TLYLQMNSLKPEDTAMYYCAASYEVVD | |
| | CYPSGYGQDYWGKGTQVTVSS | |

TABLE 35
murine anti-IL2Rb VHH Amino Acid Sequences

| | VHH AA Sequence | VHH |
|---|---|---|
| Name | (CDRs Underlined) | SEQ ID |
| DR857 | QVQLQESGGGLVQPGGSLRLSCAA | 650 |
| | SGFTFSLYDMSWVRQAPGKGLEWVSGINS | |
| | GGYSTYYAASAKGRFTISRDNAKNTLYLQ | |
| | LSSVKTEDTAMYYCAQRGLTSPYVIPNIRL | |
| | QGTQVTVSS | |
| DR1448 | EVQLVESGGRLVQAGDSLRLSCVA | 651 |
| | SGKSFSDYPLGWFRQAPGKAREYVAHISW | |
| | SGKLTYYRSTVKGRFTISRDNAENKLYLQ | |
| | MNALKPEDTAVYYCAAMKLFNYGGRYC | |
| | VLKPLTMYQQWSQGTQVTVSS | |
| DR1449 | EVQLVESGGGLVQAGGSLRLSCAA | 652 |
| | SGRSFSGYAIGWFRQAPGKEREFVAVVSW | |
| | RGSSTYYADSVKGRFTISRDNAKGTVYLQ | |
| | MNSLKPEDTAAYYCAAVPSGRSWYGRNR | |
| | YWGQGTQVTVSS | |
| DR1450 | EVQLVESGGGLVQAGGSLRLSCVI | 653 |
| | SGRSINYYRMGWFRQAPGNRRQFVAAIK | |
| | WGGDGVYADSVKGRFTISRDNTKNTVYL | |
| | QMDSLKPEDTGTYYCAKMPLSSWSRGGY | |
| | LEVWGQGTLVTVSS | |
| DR1451 | EVQLVESGGGLVQAGDSLRLSCAA | 654 |
| | SERFSWGNYAMYWFRQAPGKEREFVAAI | |
| | GRNSMATYYRDSAKGRFVISRDNAKNTL | |
| | YLEMNALKPEDTARYYCAAKFMVADGW | |
| | SRQYDYWGQGTLVTVSS | |
| DR1452 | EVQLVESGGGLVQAGGALRLSCA | 655 |
| | ASGRTFRRFMGWFRQAPGKEREFVAAIN | |
| | WPGGGTYYGDSVKGRFTISRDNAKNTVY | |
| | LQMNSLKPEDTANYYCAATRKYNLYKFA | |
| | DWGQGTQVTVSS | |
| DR1453 | EVQLVESGGRLVQAGDSLRLSCVA | 656 |
| | SGRIFNTYSMGWFRQVPGKERDFVAAIRW | |
| | SGGTTYYTDSVKGRFTISRDNAKNTVYLQ | |
| | MNSLKPEDTAVYYCWVRVRLSNTALLQR | |
| | YWGQGTLVTVSS | |
| DR1454 | EVQLVESGGGLVQAGGSLRLFCAS | 657 |
| | SERTFGDYPIGWFRQAPGKEREFVASISWG | |
| | GSRQYYTDSVKGRFTITRDNDKNTVYLQ | |
| | MNSLKPEDTAVYYCWVRVRLSNTALLQR | |
| | YWGQGTLVTVSS | |
| DR1455 | EVQLVESGGGLVQTGGSLRLSCAA | 658 |
| | SGRTFNSYAMGWFRQSPGKEREFVAVITW | |
| | NSGRTYYADSVKGRFTISRDNAKNTVYLQ | |
| | MNSLKPEDTAVYYCNSAPWAHNREWGQ | |
| | GTLVTVSS | |
| DR1456 | EVQLVESGGGLVQAGGSLRLSCAA | 659 |
| | SGLTFRTYYMSWFRQAPGKEREFVGVISW | |
| | IGSTTLYADSVKGRFSISRDNAKNTVYLQ | |
| | MNNLKPEDTAVYYCAANFLREGKREPRY | |
| | WGQGTQVTVSS | |
| DR1457 | EVQLVESGGRLVQAGDSLRLSCVA | 660 |
| | SGRIFNTYSMGWFRQVPGKERDFVAAIRW | |
| | SGGTTYYTDSVKGRFTISRDNAKNTVYLQ | |
| | MNSLKPEDTAVYYCYLRVFARRYWGQGT | |
| | QVTVSS | |
| DR1458 | EVQLVESGGGLVQAGGSLRLSCAA | 661 |
| | SGRTLSTYAMGWFRQAPGKEREFVAAIR | |
| | WASGRTYYGDSVKGRFTISRDSAKNTVYL | |
| | QMNSLKPEDTAVYYCAARSRPYLNYGDF | |
| | GYWGQGTQVTVSS | |
| DR1459 | EVQLVESGGGLVQAGGSLRLSCAA | 662 |
| | SGRTISTYAMVWFRQASGKEREFVGVISRS | |
| | GDRTYYADSVKGRFTISRDNLGNIVRLQL | |
| | NSLKPEDTAVYYCARGGYTGIETITARGR | |
| | GTLVTVSS | |
| DR1460 | EVQLVESGGGLVQTGDSLRLSCAA | 663 |
| | PESIFNNNAVYWYRQFPGKEREYVGLITIG | |
| | GRTGYADSVKGRFTISRDNANNVAFLQM | |
| | DSLKPEDTAVYYCATGLKFGFNFYSKTAY | |
| | DYWGQGTQVTVSS | |
| DR1461 | EVQLVESGGRLVQAGDSLRLSCVA | 664 |
| | SGRIFNTYSMGWFRQVPGKERDFVAAIRW | |
| | SGGTTYYTDSVKGRFTISRDNAKNTVYLQ | |
| | MKDLKPQDTAVYYCAAVPSGRSWYGRN | |
| | RYWGQGTLVTVSS | |
| DR1462 | EVQLVESGGGLVQAGGSLRLSCVS | 665 |
| | SGRTFGYVAMGWFRQAPGKEREFVASIN | |
| | WSGGSTAYADSVKGRFTISRDNAKNTVYL | |
| | QMNSLKPEDTAVYYCAGSTRFYIATMEQG | |
| | SYDYWGQGTQVTVSS | |
| DR1463 | EVQLVESGGSVVQPGDSLRLACTA | 666 |
| | SGRSFRSYAIGWFRQASGKERVFVAAISYD | |
| | GRRTYYGRSLKDRFTISRDNAKNTVYLQM | |
| | NSLKPEDTAVYYCATHRSGTMFARYGMD | |
| | YWGKGTLVTVSS | |
| DR1464 | EVQLVESGGGLVQAGGSLRLSCAA | 667 |
| | SGRTFSSYAMGWFRQAPGKEREFVTAISR | |
| | SGGYTSYADSVKGRFTISRDNAKNTVYLQ | |
| | MNSLKPEDTAVYYCAKLIAPFYYGMDYW | |
| | TKGTQVTVSS | |
| DR1465 | EVQLVESGGGLMQAGGALRLSCT | 668 |
| | ASGPTFTSYTMGWFRQSPGKRREFVAVIS | |
| | KGGRTYYADSVKGRFTISRDNAKNTFYLQ | |
| | MSSLKPEDTAVYYCAGQRVGATSKYEYD | |
| | YWGQGTQVTVSS | |
| DR1466 | EVQLVESGGGLVRAGGSLRLSCAA | 669 |
| | SGFTFSTDWMYWVRRAPGKGLEWVSLIN | |
| | TDGTSTSYTKSVKGRFTVSRDNAKNTLYL | |
| | QMNSLKPEDTALYYCARGRTYWFYAMD | |
| | YWGKGTQVTVSS | |
| DR1467 | EVQLVESGGGLVQAGDSLRLSCAA | 670 |
| | SGRISNYAMGWFRQAPGKEREFVAVITRS | |
| | GGSTYYADSVKGRFTISRDNGKNTIDLQM | |
| | NRLKPEDTAVYYCAVRRSQKLVTFGAEYP | |
| | WWGQGTLVTVSS | |
| DR1468 | EVQLVESGGGLVQAGGSLRLSCTT | 671 |
| | SGRTGTHYAMGWFRQAPGKEREFVSLIL | |
| | WNGEFTTYKDSVKGRFTISREKGENTVYL | |
| | QMNSLKPEDTAVYYCYLRVFARRYWGQG | |
| | TQVTVSS | |
| DR1469 | EVQLVESGGGLVQPGGSLRLSCEV | 672 |
| | SGFTFSNYWMYWIRQAPGKGLEWVSHIN | |
| | TNGGNTYYRHSVKGRFTISRDNAKNTLYL | |
| | QMNGLKSEDTAVYYCAKANSDVGLGYY | |
| | GMDYWGKGTQVTVSS | |
| DR1470 | EVQLVESGGGSVQPGGSLRLSCAA | 673 |
| | PESIFNNNAVYWYRQFPGKEREYVGLITIG | |
| | GRTGYADSVKGRFTISRDNANNVAFLQM | |
| | DNLKPEDTAVYYCAARPGYWSSSYDYWG | |
| | QGTQVTVSS | |
| DR1471 | EVQLVESGGGLVQAGGSLRLSCVF | 674 |
| | SGRAPASYAMAWFRQAVGNEREFVAAIN | |
| | WSGRRTYYADSVKGRFTISKDNAQNTAY | |
| | LQMTNLEPEDTATYYCNAYLSGTYYWGQ | |
| | GTQVTVSS | |
| DR1472 | EVQLVESGGGLVRAGDSLRLSCAV | 675 |
| | SGLASSSFFMTWFRQGQGKEREFVATISW | |
| | TGRTSYYAASVKGRFTVSRDNAKNTVYL | |
| | QMNSLNSEDTAVYFCAAYPRTLVRNREPI | |
| | HWGQGTQVTVSS | |

TABLE 36
human anti-IL2Rg VHH Amino Acid Sequences

| | VHH Sequence | SEQ ID |
|---|---|---|
| Name | (CDRs are underlined) | NO: |
| hIL2Rg_ | QVQLQESGGGSVQAGGSLRLSCAASGE | 676 |
| VHH-1 | TFDDSDMGWYRQAPGNECDLVSTISSDGSTY | |
| | YADSVKGRFTISQDNAKNTVYLQMDSVKPED | |
| | TAVYYCAADFMIAIQAPGAGCWGQGTQVTVS | |
| | S | |
| hIL2Rg_ | QVQLQESGGGSVPAGGSLKLSCAASGF | 677 |
| VHH-2 | SFSSYPMTWARQAPGKGLEWVSTIASDGGST | |
| | AYAASVEGRFTISRDNAKSTLYLQLNSLKTED | |
| | TAMYYCTKGYGDGTPAPGQGTQVTVSS | |
| hIL2Rg_ | QVQLQESGGGSVQTGGSLRLSCTASGF | 678 |
| VHH-3 | TFDDREMNWYRQAPGNECELVSTISSDGSTYY | |
| | ADSVKGRFTISQDNAKNTVYLQMDSVKPEDT | |
| | AVYYCAADFMIAIQAPGAGCWGQGTQVTVSS | |
| hIL2Rg_ | QVQLQESGGGSVQAGGSLRLSCTASGF | 679 |
| VHH-4 | TFDDSDMGWYRQAPGNECELVSTISSDGNTY | |
| | YTDSVKGRFTISQDNAKNTVYLQMNSLGPED | |
| | TAVYYCAAEPRGYYSNYGGRRECNYWGQGT | |
| | QVTVSS | |
| hIL2Rg_ | QVQLQESGGGSVQAGGSLRLSCAASGF | 680 |
| VHH-5 | SFSSYPMTWARQAPGKGLEWVSTIASDGGST | |
| | AYAASVEGRFTISRDNAKSTLYLQLNSLKTED | |
| | TAMYYCTKGYGDGTPAPGQGTQVTVSS | |
| hIL2Rg_ | QVQLQESGGGAVQAGGSLRLSCAASGF | 681 |
| VHH-6 | TFSNAHMSWVRQAPGKGREWISSIYSGGSTW | |
| | YADSVKGRFTISRDNSKNTLYLQLNSLKTEDT | |
| | AMYYCAENRLHYYSDDDSLRGQGTQVTVSS | |
| hIL2Rg_ | QVQLQESGGGLVQPGGSLRLSCAASGF | 682 |
| VHH-7 | TFDDREMNWYRQAPGNECELVSTISSDGSTYY | |
| | ADSVKGRFTISQDNAKNTVYLQMDSVKPEDT | |
| | AVYYCAADFMIAIQAPGAGCWGQGTQVTVSS | |
| hIL2Rg_ | QVQLQESGGGSVQAGGSLRLSCVASGY | 683 |
| VHH-8 | TFSSYCMGWFRQAPGKEREGVAALGGGSTYY | |
| | ADSVKGRFTISQDNAKNTLYLQMNSLKPEDT | |
| | AMYYCAAAWVACLEFGGSWYDLARYKHWG | |
| | QGTQVTVSS | |
| hIL2Rg_ | QVQLQESGGGSVQAGGSLRLSCTASGF | 684 |
| VHH-9 | TFDDSDMGWYRQAPGGECELVTISSDGSTYY | |
| | ADSVKGRFTISQDNAKNTVYLQMNSLKPEDT | |
| | AVYYCAAEPRGYYSNYGGRRECNYWGQGTQ | |
| | VTVSS | |
| hIL2Rg_ | QVQLQESGGGSVQAGGSLRLSCAASGS | 685 |
| VHH-10 | IYSSAYIGWFRQAPGKKREGVAGIYTRDGSTA | |
| | YADSVKGRFTISQDSAKKTVYLQMNSLKPEDT | |
| | AMYYCAAGRRTKSYVYIFRPEEYNYWGQGT | |
| | QVTVSS | |
| hIL2Rg_ | QVQLQESGGGSVQAGGSLRLSCAASGF | 686 |
| VHH-11 | TFSSAHMSWVRQAPGKGREWIASIYSGGGTFY | |
| | ADSVKGRFTISRDNAKNTLYLQLNSLKTEDTA | |
| | MYYCATNRLHYYSDDDSLRGQGTQVTVSS | |
| hIL2Rg_ | QVQLQESGGGSVQAGGSLRLSCAASGF | 687 |
| VHH-12 | TFSNAHMSWVRQAPGKGREWISSIYSGGSTW | |
| | YADSVKGRFTISRDNSKNTLYLQLNSLKTEDT | |
| | AMYYCAENRLHYYSDDDSLRGQGTQVTVSS | |
| hIL2Rg_ | QVQLQESGGGSVQAGGSLRLSCTASRFI | 688 |
| VHH-13 | FDDSDMGWYRQAPGNECELVSTISSDGSTYY | |
| | ADSVKGRFTISRDNAKNTVYLQMNSLKPEDT | |
| | AVYYCAAEPRGYYSNYGGRRECNYWGQGTQ | |
| | VTVSS | |
| hIL2Rg_ | QVQLQESGGGSVQAGGSLKLSCTVSGF | 689 |
| VHH-14 | TADDSDMGWYRQGPGNECELVTISSDGSTYY | |
| | ADSVKGRFTISQDNAKNTVYLQMNSLKPEDT | |
| | AVYYCAAEPRGYYSNYGGRRECNYWGQGTQ | |
| | VTVSS | |
| hIL2Rg_ | QVQLQESGGGLVQPGGSLRLSCAASGF | 690 |
| VHH-15 | TFSSAHMSWVRQAPGKGREWIASIYSGGGTFY | |
| | ADSVKGRFTISRDNAKNTLYLQLNSLKAEDTA | |
| | MYYCATNRLHYYSDDDSLRGQGTQVTVSS | |
| hIL2Rg_ | QVQLQESGGGLVQPGGSLRLSCVASGF | 691 |
| VHH-16 | TFSNAHMSWVRQAPGKGREWISSIYSGGSTW | |
| | YADSVKGRFTISRDNSKNTLYLQLNSLKTEDT | |
| | AMYYCAENRLHYYSDDDSLRGQGTQVTVSS | |
| hIL2Rg_ | QVQLQESGGGLVQPGGSLRLSCAASGF | 692 |
| VHH-17 | TFSNAHMSWVRQAPGKGREWISSIYSGGSTW | |
| | YADSVKGRFTISRDNSKNTLYLQLNSLKTEDT | |
| | AMYYCAENRLHYYSDDDSLRGQGTQVTVSS | |
| hIL2Rg_ | QVQLQESGGGLVQPGGSLRLSCAASGF | 693 |
| VHH-18 | TFSSYPMTWARQAPGKGLEWVSTIASDGGST | |
| | AYAASVEGRFTISRDNAKSTLYLQLNSLKTED | |
| | TAMYYCTKGYGDGTPAPGQGTQVTVSS | |
| hIL2Rg_ | QVQLQESGGGSVQAGGSLRLSCTASGF | 694 |
| VHH-19 | TFDDREMNWYRQAPGNECELVSTISSDGSTYY | |
| | ADSVKGRFTISQDNAKNTVYLQMDSVKPEDT | |
| | AVYYCAADFMIAIQAPGAGCWGQGTQVTVSS | |
| hIL2Rg_ | QVQLQESGGGSVQAGGSLRLSCTASGF | 695 |
| VHH-20 | TFDDSDMGWYRQAPGNECELVSTISSDGSTYY | |
| | ADSVKGRFTISQDNAKNTVYLQMNSLKPEDT | |
| | AVYYCAAEPRGYYSNYGGRRECNYWGQGTQ | |
| | VTVSS | |
| hIL2Rg_ | QVQLQESGGGSVQAGGSLRLSCVASGY | 696 |
| VHH-21 | TSCMGWFRQAPGKEREAVATIYTRGRSIYYA | |
| | DSVKGRFTISQDNAKNTLYLQMNSLKPEDIAM | |
| | YSCAAGGYSWSAGCEFNYWGQGTQVTVSS | |
| hIL2Rg_ | QVQLQESGGGLVQPGGSLRLSCTASGF | 697 |
| VHH-22 | SFSSYPMTWARQAPGKGLEWVSTIASDGGST | |
| | AYAASVEGRFTISRDNAKSTLYLQLNSLKTED | |
| | TAMYYCTKGYGDGTPAPGQGTQVTVSS | |
| hIL2Rg_ | QVQLQESGGGLVQPGGSLRLSCAASGF | 698 |
| VHH-23 | SFSSYPMTWARQAPGKGLEWVSTIASDGGST | |
| | AYAASVEGRFTISRDNAKSTLYLQLNSLKTED | |
| | TAMYYCTKGYGDGTPAPGQGTQVTVSS | |

TABLE 37
murine anti-IL2Rg VHH Amino Acid Sequences

| | VHH AA Sequence | SEQ ID |
|---|---|---|
| Name | (CDRs Underlined) | NO: |
| mIL2Rg_ | QVQLQESGGGSVLAGGSLRLSCVASGYGYNYIGWFRQTPG | 699 |
| VHH1 | KEREGVAVIYTGGGDTYYADSVKGRFTASRDNAKSTLYLQMN | |
| | SLEPEDTAMYYGVARYCVGSVYACLRGGHDEYAHWGQGTQVT | |
| | VSS | |
| mIL2Rg_ | QVQLQESGGGSVQPGGSLRLSCAASGSTYANYLMGWFRQAP | 700 |
| VHH2 | GKEREGVAAIYSGGGSTYYADSVKGRFTISQDNAKNTLYLQ | |
| | MNSLKPEDTAMYYCAAASAVKGDKGDIVVVVTGTQRMEYDY | |
| | WGHGTQVTVSS | |
| mIL2Rg_ | QVQLQESGGGSVQAGASLRLSCSVSGFTFDESVMSWLRQGPG | 701 |
| VHH3 | NECDAVAIISSDDNTYYDDSVKGRFTISEDNAKNMVYLQMNS | |
| | LKPEDTAVYYCAARRRRPVYDSDYELRPRPLCGDFGVWGQGT | |
| | QVTVSS | |
| mIL2Rg_ | QVQLQESGGGSVQAGGSLRLSCIGSGLPFDEDDMGWYRQAP | 702 |
| VHH4 | GNECELVSSISSDGTAYYADSVKGRFTISRDNAKNTVLLQMNS | |
| | LKPEDTAVYYCAAGVHRQFGGSSSCGDAFYGMDYWGKGTQVT | |
| | VSS | |
| mIL2Rg_ | QVQLQESGGGSVQAGGSLRLSCVASGDVYGRNSMAWFR | 703 |
| VHH5 | QAPGKEREGVAVGYSVVTTTYYADSVKGRFTISEDNDKNTVYLE | |
| | MNSLKPEDTAMYYCAADGNLWRGLRPSEYTYWGQGTQVTVSS | |
| mIL2Rg_ | QVQLQESGGGSVQAGGSLRLSCATSGFPYSRYCMGWFRQ | 704 |
| VHH6 | APGKEREGVAAIEPDGSTSYADSVKGRFTISQDNAVNTLYLQMN | |
| | NLKPEDTAMYYCAADERCFYLKDYDLRRPAQYRYWGQGTQVT | |
| | VSS | |
| mIL2Rg_ | QVQLQESGGGLVQPGGSLRLSCTVSGFTFDESDMGWLRQ | 705 |
| VHH7 | NPGNECGVVSVITSDDNPYYDDSVKGRFTISEDNAKNMVYLQM | |
| | NSLKPEDTGVYYCATRSRQPVYSRDYELRPRPLCGDFGVWGQGT | |
| | QVTVSS | |
| mIL2Rg_ | QVQLQESGGGSVQAGGSLRLSCTASGFTFDDFDMGWYRQAPG | 706 |
| VHH8 | NECELVSTISDDGSTYYADSVKGRSSISRDNAKNTVYLQMN | |
| | RLKPEDTGVYYCAAEGALGSKTNCGWVGNFGYWGQGTQVTVS | |
| | S | |
| mIL2Rg_ | QVQLQESGGGSVQAGGSLRLSCAASGFTFDDFDMGWYRQAP | 707 |
| VHH9 | GNECELVSTISDDGSTYYADSVKGRSSISRDNAKNTVYLQM | |
| | NSLKPEDTAVYYCAAEGALGSKTNCGWVGNFGYWGQGTQVT | |
| | VSS | |
| mIL2Rg_ | QVQLQESGGGLVQPGGSLRLSCAASGFTFDDFDMGWYRQAPG | 708 |
| VHH10 | NECELVSTISDDGSTYYADSVKGRSSISRDNAKSTVYLQMNR | |
| | LKPEDTGVYYCAAEGALGSKTNCGWVGNFGYWGQGTQVTVSS | |
| mIL2Rg_ | QVQLQESGGGLVQPGGSLKLSCAASGFTFSDRDMGWYRQ | 709 |
| VHH11 | APGNECERVSTISDDGSTYYADSVKGRSSISRDNAKNTVYLQMN | |
| | SLKPEDTAVYYCAAEGALGSKTNCGWVGNFGYWGQGTQVTVS | |
| | S | |
| mIL2Rg_ | QVQLQESGGGSVLAGGSLRLSCVASGYGYNYIGWFRQTP | 710 |
| VHH12 | GKEREGVAVIYIGGGDTYYADSVKGRFTASRDNAKSTLYLQMNS | |
| | LEPEDTAMYYCVARYCVGSVYACLRGGHDEYAHWGQGTQVTV | |
| | SS | |
| mIL2Rg_ | QVQLQESGGGSVLAGGSLRLSCVASGYGYNYIGWFRQTP | 711 |
| VHH13 | GKEREGVAVIYTGGGDTYYADSVKGRFTASRDNAKSTLYLQMN | |
| | SLEPEDTAMYYCVARYCVGSVYACLRGGHDEYAHWGQGTQVT | |
| | VSS | |
| mIL2Rg_ | QVQLQESGGGSVQAGGSLRLSCAASGFTFDDFDMGWYR | 712 |
| VHH14 | QAPGNECELVSTISDDGSTYYANSVKGRSSISRDNAKNMVYLQM | |
| | NSLKPEDTAVYYCAAEGALGSKTNCGWVGNFGYWGQGTQVTV | |
| | SS | |
| mIL2Rg_ | QVQLQESGGGSVQAGGSLRLSCTASGFTFDDFDMGWYRQ | 713 |
| VHH15 | APGNECELVSTISDDGSTYYADSVKGRSSISRDNAKNTVYLQMN | |
| | RLKPEDTGVYYCAAEGALGSKMNCGWVGNFGYWGQGTQVTVS | |
| | S | |

TABLE 38
IL2Rb sdAb VHH DNA SEQUENCE

| | | SEQ |
|---|---|---|
| | | ID |
| Name | Sequence | NO: |
| hIL2Rb_VHH | CAGGTCCAGTTGCAGGAGAGCGGTGGCGGT | 714 |
| -1 | AGCGTGCAGGCCGGTGGCAGTCTGCGCCTTTCCTG | |
| | CGTAGGCAGCGGTTACACCTACGACACCTCCGACA | |
| | TGAGCTGGTATAGGCAGGCCCCAGGCAAGGAGAGG | |
| | GAATTTGTCTCCGATATTGATTCCGGCGACTGGGC | |
| | TGCCTACGCTGATGCCGTGAAGGGCCGCTTCACAA | |
| | TCAGCCGTGACAACGCCAAAAAGACCGTGTATCTG | |
| | CAAATGAACAGTCTGGAACCTGAGGACACGGCAAT | |
| | GTACTATTGCAAAGCCTCTTATTGGAAGTGGGGCA | |
| | AGCTCAATAACTTCTGGGGTCCCGGCACACAGGTG | |
| | ACCGTGTCCTCT | |
| hIL2Rb_VHH | CAGGTGCAGCTCCAGGAAAGCGGCGGAGGC | 715 |
| -2 | CTGGTCCAGCCTGGCGGGAGCTTGCGTCTGTCCTG | |
| | CGTGGCAAGCGGATTCACGTTTAGTAATTACTGGA | |
| | TCTTTTGGGTACGGCAGGCAGCTGGCAAGGGGCTT | |
| | GAGTGGCTTTCAACATCCAACACAGGTGGCGATAC | |
| | TACAAAATACGCGGATTCTGTAAAAGGCCGGTTCA | |
| | CGATCAGTCGCGACTCCGCGAAGAACACCGAATAC | |
| | CTCCAGATGAACTCCTTGAAGCCTGAAGACACCGC | |
| | AGTCTACTATTGCGAAACCGGACGCTGCGCCAGGT | |
| | CTGGAGGTTACCAGGGCACGCAGGTGACCGTTTCC | |
| | TCC | |
| hIL2Rb_VHH | CAGGTGCAGCTCCAGGAGTCCGGCGGGGGA | 716 |
| -3 | CTGGTCCAGCCAGGAGGTTCTTTGAAGCTGAGTTG | |
| | CGCCGCTTCTGGTTTTAGATTCTCTAACTACGGCA | |
| | TGTCTTGGGTTCGCCAAGCGCCCGGAGAGGGCCTG | |
| | GAGTGGGTCAGTTACATTAACGGGGACGGCTCCCG | |
| | CACCCACTACGCTGACTCCGTCAAAGGGCGGTTCA | |
| | CCATCTCACGTGACAACGCTAAGAACACCCTGTAC | |
| | CTCCAGCTGAACAGCCTGAAGACAGAGGATACAGC | |
| | CATGTATTACTGTGAGAAGGGTCTGTCTCGCGACG | |
| | GTTGGTCCCTCAGCGCTGCCAGTCGCGGGCAGGGG | |
| | ACCCAAGTGACAGTCAGCTCT | |
| hIL2Rb_VHH | CAGGTCCAACTGCAAGAGAGCGGCGGGGGC | 717 |
| -4 | AGCGTGCAGACTGGAGGCTCCCTGCGTCTGTCCTG | |
| | TGCGGTGTCAGGGTATACAACCTATTCATTCAACT | |
| | ATATGGGATGGTTCCGCCAGGCTCCGGGCAAGGAG | |
| | CGCGAAGGCGTGGCGGTAATCTACACCGGCGGGGG | |
| | ATCTACCCTGTATGCTGATTCTGTTAAAGGGCGCT | |
| | TCACTATCTCCCAGGACAACGCCAAGAACACTGTG | |
| | TACCTCCAGATGAACTCCCTGAAACCCGAAGATAC | |
| | CGCGATGTATTACTGCGCTGCCGACGATCAGCGCT | |
| | TCGCCTCCCCGCTCTACGCCTACTTCGGTTACTGG | |
| | GGCCAGGGCACTCAGGTGACCGTGTCTAGC | |
| hIL2Rb_VHH | CAAGTGCAACTCCAGGAGAGCGGTGGAGGC | 718 |
| -5 | TCTGTGCAGGTGGGTGGCAGTCTGCGTCTCTCTTG | |
| | CGCTACCTCTGGTGACACCAAGAGCATCCGTTGTA | |
| | TGGGCTGGTTCCGTCAAACTCCTGGTAAGGAGCGC | |
| | GAAGGCATCGCCGCTATTGATCGCGAGGGTTTTGC | |
| | CACCTACGCTGATAGCGTGTATGATCGCTTCACCA | |
| | TCGCCCAGGATAACGCCCAGAATACCCTGTACCTG | |
| | GAGATGAATGCCCTGAAGCCTGAGGATACAGCAAT | |
| | GTATTACTGCGCTGCCCAGAATATGTGCCGCGTAG | |
| | TGAGAGGTGCCATGACGGGGGTGGACTATTGGGGC | |
| | AAGGGCACCCAAGTGACTGTGTCCAGC | |
| hIL2Rb_VHH | CAAGTTCAGCTGCAAGAGTCTGGGGGCGGT | 719 |
| -6 | AGCGTGCAGGCGGGTGGGTCCCTGCGCCTCTCTTG | |
| | CGCTGCCTCCGAGTACACAGCATCTCGGTACTGCA | |
| | TGGCCTGGTTTCGTCAGGCTCCGGGTAAGGAGCGG | |
| | GAGGGCGTTGCCGCTATTCATCCGGGCGGAGGTAC | |
| | GACCTACTATGCAGACTCCGTAAAGGGTCGCTTCT | |
| | CCATCAGCCAGGATTCTGCCGACAACACCTTGTAC | |
| | CTCCAGATGAACTCACTGAAACCTGAGGATACCGC | |
| | GATGTATTACTGCGCGGCTGGCTCTCTGTGGGTGC | |
| | CCTTCGGCGACCGCTGTGCTGCCAACTATTGGGGC | |
| | CAGGGAACCCAGGTTACAGTGTCTTCC | |
| hIL2Rb_VHH | CAGGTTCAGTTGCAGGAGTCCGGCGGTGGC | 720 |
| -7 | AGCGTACAGGCCGGGGGCTCCCTGAGACTTAGTTG | |
| | CGCAGCGTCCGGTTACGAGTACTGCCGTATTCACA | |
| | TGACTTGGTATAGGCAAGGCCCTGGTAAGGAACGC | |
| | GAGTTCGTTTCTTCCATCGGGAGTGATGGCCGTAA | |
| | AACCTACGCCAACAGCGTGACCGGACGTTTCACCA | |
| | TCAGTCGTGACAACGCTAACCACACGGTTTACTTG | |
| | CAGATGAACTCCCTCTCCCCTGAGGACACCGCCAT | |
| | GTACTATTGTAAGACCGAGTACCTGTATGGCCTCG | |
| | GCTGCCCAGATGGTAGCGCCTACTGGGGCCAGGGG | |
| | ACCCAGGTCACCGTTTCCAGT | |
| hIL2Rb_VHH | CAGGTCCAGTTGCAGGAGTCTGGAGGTGGA | 721 |
| -8 | TCAGTGCAGGTTGGGGGTTCACTGAAACTTAGCTG | |
| | TGCCGCTTCTGGGTATACATATTCTAGCTACTATT | |
| | GTATGGGCTGGTTTCGCCAGGCTCCTGGAAAGGAG | |
| | CGCGAAGGGGTGGCGGCCATCGACTCCGACGGCTC | |
| | CACATCCTACGCGGACTCCGTGAAGGGCCGCTTTA | |
| | CAATCAGTCAGGATGACGCTAAGAACACGCTGTAC | |
| | CTCCAGATGAATAGCCTGAAGCCCGAAGATACGGC | |
| | GATGTACTATTGCGCCGCGTCTTACGAAGTAGTGG | |
| | ACTGCTATCCGTCCGGCTATGGCCAAGATTACTGG | |
| | GGAAAAGGAACTCAAGTGACCGTGAGTTCC | |

TABLE 39
murine IL2Rb sdAb VHH DNA SEQUENCE

| Name | DNA Sequence | SEQ ID NO |
|---|---|---|
| DR857 DNA | CAGGTGCAGTTGCAGGAGAGCGGGGGCGGTCTG | 722 |
| | GTCCAGCCGGGCGGGTCACTGCGCCTGTCTTGTGCCGCT | |
| | TCAGGATTTACCTTTAGTTTGTACGACATGAGTTGGGTT | |
| | AGGCAAGCGCCTGGCAAGGGTCTGGAGTGGGTGTCTGG | |
| | CATCAACTCAGGAGGCTATAGCACCTATTACGCGGCCT | |
| | CCGCCAAGGGCCGCTTCACCATCTCTAGGGATAACGCA | |
| | AAGAACACTCTTTACCTCCAGCTCAGCTCTGTTAAGACT | |
| | GAGGATACTGCCATGTATTACTGTGCCCAGCGCGGCCT | |
| | CACCAGCCCGTATGTGATTCCGAACATTCGCTTGCAGG | |
| | GCACACAGGTGACTGTGTCCAGC | |
| DR1448 DNA | GAGGTCCAACTGGTGGAGAGCGGCGGAAGGCTG | 723 |
| | GTGCAGGCTGGCGACTCCCTGCGCTTGAGCTGTGTGGC | |
| | AAGCGGAAAGTCCTTTTCCGATTACCCTCTCGGTTGGTT | |
| | CCGTCAGGCTCCTGGAAAAGCTAGGGAGTATGTGGCCC | |
| | ACATCTCTTGGAGCGGCAAACTGACTTACTATCGCTCA | |
| | ACAGTGAAGGGCCGGTTTACTATCAGCCGCGATAACGC | |
| | TGAAAATAAACTGTACCTCCAGATGAACGCCCTGAAGC | |
| | CCGAGGATACTGCCGTGTATTACTGTGCTGCCATGAAG | |
| | TTGTTCAACTATGGCGGGCGTTACTGTGTTCTCAAGCCC | |
| | CTGACAATGTACCAACAGTGGAGCCAGGGTACTCAGGT | |
| | CACAGTTAGCTCC | |
| DR1449 DNA | GAGGTCCAGCTCGTTGAGAGCGGCGGGGGCCTG | 724 |
| | GTGCAGGCCGGTGGCAGCCTCCGTCTCTCCTGTGCCGCT | |
| | TCTGGCCGCAGTTTCTCCGGGTATGCTATCGGGTGGTTC | |
| | AGACAGGCACCAGGCAAGGAGCGCGAGTTTGTTGCTGT | |
| | CGTGAGCTGGCGGGGTTCTAGCACCTACTATGCCGACT | |
| | CAGTCAAGGGCCGCTTCACAATTAGCAGGGACAACGCC | |
| | AAGGGCACTGTATACCTCCAGATGAACTCCCTGAAGCC | |
| | AGAGGATACCGCCGCGTATTACTGCGCTGCCGTGCCAT | |
| | CTGGCCGCTCCTGGTACGGTAGGAACCGTTACTGGGGT | |
| | CAGGGAACTCAGGTCACCGTGTCCTCA | |
| DR1450 DNA | GAAGTGCAGCTCGTTGAAAGCGGCGGGGGCCTC | 725 |
| | GTGCAAGCTGGAGGCTCACTTCGCCTTTCTTGTGTCATC | |
| | AGTGGCCGCTCTATCAATTATTACCGGATGGGCTGGTTC | |
| | CGCCAGGCCCCTGGCAACCGCAGGCAATTCGTGGCGGC | |
| | TATCAAGTGGGGTGGCGACGGTGTGTACGCCGACTCCG | |
| | TGAAGGGGCGCTTTACCATTAGTCGGGACAACACCAAG | |
| | AACACCGTATACTTGCAGATGGACAGTCTGAAGCCCGA | |
| | AGACACCGGAACATATTACTGCGCCAAAATGCCTCTTT | |
| | CTAGCTGGTCCAGAGGTGGCTACCTTGAGGTGTGGGGT | |
| | CAAGGCACGCTGGTGACCGTGTCTTCT | |
| DR1451 DNA | GAAGTGCAACTCGTGGAAAGTGGAGGCGGTCTC | 726 |
| | GTCCAGGCGGGGGACAGCCTGCGTCTGTCTTGCGCCGC | |
| | ATCCGAGCGTTTTTCTTGGGGCAACTATGCTATGTATTG | |
| | GTTCAGGCAGGCCCCTGGCAAGGAACGCGAGTTCGTGG | |
| | CTGCCATTGGCCGCAACAGCATGGCCACGTATTACAGA | |
| | GATAGCGCCAAGGGCCGCTTCGTCATCAGCCGTGACAA | |
| | CGCTAAGAACACCCTGTACCTGGAAATGAACGCCTTGA | |
| | AGCCTGAAGATACTGCTAGGTACTATTGCGCCGCGAAG | |
| | TTCATGGTGGCCGACGGCTGGAGCAGACAGTATGACTA | |
| | CTGGGGCCAGGGCACTCTGGTAACGGTCTCCTCC | |
| DR1452 DNA | GAAGTTCAGCTTGTGGAAAGCGGCGGTGGGCTT | 727 |
| | GTCCAGGCTGGTGGAGCGCTGCGCCTCTCCTGCGCAGC | |
| | GAGTGGCAGGACCTTCCGCCGTTTCATGGGTTGGTTTCG | |
| | CCAGGCCCCAGGGAAGGAGCGCGAGTTTGTTGCTGCCA | |
| | TCAACTGGCCTGGAGGTGGCACCTACTATGGCGATAGC | |
| | GTGAAGGGCCGTTTCACAATCTCCAGGGACAACGCCAA | |
| | GAATACCGTCTACCTGCAAATGAACTCCCTGAAGCCGG | |
| | AGGACACCGCGAACTATTACTGCGCCGCAACCCGCAAG | |
| | TACAACCTGTATAAATTCGCGGACTGGGGCCAGGGCAC | |
| | CCAGGTGACAGTGTCATCT | |
| DR1453 DNA | GAGGTCCAGCTCGTCGAGTCCGGCGGGCGGCTG | 728 |
| | GTGCAGGCTGGCGACAGCCTTCGCCTGTCCTGTGTGGC | |
| | ATCCGGCAGAATCTTTAACACCTACTCAATGGGTTGGTT | |
| | TAGGCAGGTTCCCGGAAAGGAGAGGGATTTCGTGGCTG | |
| | CCATCAGATGGTCCGGTGGCACCACATATTACACTGAT | |
| | TCTGTCAAGGGGCGCTTCACCATTAGTCGCGATAACGC | |
| | AAAAAACACCGTGTACCTGCAAATGAATAGCCTGAAGC | |
| | CTGAGGACACCGCCGTATATTACTGTTGGGTGCGCGTTC | |
| | GCCTGAGCAACACAGCCCTGCTTCAGCGCTACTGGGGT | |
| | CAGGGAACCTTGGTTACCGTGTCAAGC | |
| DR1454 DNA | GAAGTCCAGCTCGTGGAGTCCGGGGGAGGTCTG | 729 |
| | GTTCAAGCTGGGGGTTCTTTGCGCCTCTTTTGCGCGTCC | |
| | AGCGAGCGTACTTTCGGAGATTACCCAATCGGATGGTT | |
| | CCGTCAAGCCCCAGGCAAGGAGCGCGAGTTTGTCGCGT | |
| | CCATCAGCTGGGGTGGCTCACGTCAGTACTATACTGAC | |
| | TCCGTTAAGGGCCGCTTCACGATTACAAGAGATAATGA | |
| | TAAGAACACCGTGTATCTCCAGATGAACTCCCTCAAGC | |
| | CCGAGGACACTGCTGTTTACTATTGCTGGGTGCGGGTG | |
| | CGTCTGTCAAACACGGCACTGCTTCAGCGCTATTGGGG | |
| | ACAGGGCACCCTGGTCACCGTCTCCTCA | |
| DR1455 DNA | GAAGTCCAGCTGGTCGAGTCAGGCGGGGGACTG | 730 |
| | GTGCAGACTGGGGGTAGTCTGCGCCTGAGCTGCGCAGC | |
| | TTCAGGAAGAACCTTCAACTCCTACGCTATGGGCTGGTT | |
| | CAGACAGAGCCCAGGCAAAGAGCGGGAGTTCGTGGCG | |
| | GTGATTACGTGGAACTCTGGCCGCACGTACTATGCTGA | |
| | CAGTGTCAAAGGCAGATTTACCATCAGTAGGGATAACG | |
| | CCAAGAACACAGTGTATCTCCAGATGAACTCTCTGAAG | |
| | CCCGAGGATACTGCTGTGTATTACTGTAACAGCGCCCC | |
| | CTGGGCTCACAATCGTGAGTGGGGGCAGGGGACCCTCG | |
| | TTACCGTCAGCAGC | |
| DR1456 DNA | GAGGTGCAGCTGGTGGAATCTGGTGGAGGGCTG | 731 |
| | GTGCAGGCTGGCGGTTCCCTCCGTCTGTCTTGTGCGGCC | |
| | TCAGGGCTGACCTTCAGGACCTACTATATGTCATGGTTC | |
| | CGCCAAGCGCCCGGCAAGGAACGCGAGTTCGTCGGAGT | |
| | GATCTCTTGGATCGGCTCCACTACCCTCTACGCCGATTC | |
| | TGTGAAAGGTAGGTTTTCCATCTCACGCGATAATGCTA | |
| | AGAACACCGTCTACCTCCAGATGAATAACTTGAAACCC | |
| | GAGGACACCGCCGTCTACTATTGCGCGGCCAACTTCCT | |
| | CAGAGAGGGAAAGCGCGAACCTCGGTATTGGGGACAA | |
| | GGGACCCAGGTGACCGTTTCCTCC | |
| DR1457 DNA | GAGGTGCAGTTGGTTGAGTCTGGCGGAAGGCTC | 732 |
| | GTTCAAGCTGGTGACAGCCTGCGGCTGTCTTGCGTCGCT | |
| | TCTGGACGCATCTTCAACACATATTCAATGGGCTGGTTC | |
| | AGACAGGTGCCTGGCAAGGAGCGCGACTTCGTGGCAGC | |
| | TATCCGTTGGAGCGGGGGCACTACGTATTACACCGATT | |
| | CTGTGAAGGGGCGCTTCACAATCTCCAGGGATAATGCA | |
| | AAGAACACCGTGTACCTTCAGATGAACAGCTTGAAGCC | |
| | TGAAGATACCGCAGTGTACTATTGTTATCTGAGGGTGTT | |
| | CGCTCGGCGCTATTGGGGCCAGGGCACACAGGTGACAG | |
| | TGTCCTCC | |
| DR1458 DNA | GAAGTGCAGCTGGTCGAGAGCGGGGGTGGACTT | 733 |
| | GTGCAGGCTGGTGGCTCCCTTAGGCTGAGCTGCGCCGC | |
| | TTCCGGCAGAACTCTCTCTACCTATGCTATGGGTTGGTT | |
| | CCGTCAGGCCCCCGGCAAGGAGCGCGAGTTCGTCGCGG | |
| | CCATCCGCTGGGCTTCTGGCCGTACTTATTACGGTGACA | |
| | GCGTGAAGGGTCGGTTCACCATCTCTCGTGACAGTGCG | |
| | AAAAATACCGTGTACCTCCAGATGAACTCCCTGAAGCC | |
| | GGAGGACACGGCGGTTTATTACTGCGCGGCCAGGAGCA | |
| | GGCCTTACCTGAACTACGGAGACTTTGGGTACTGGGGC | |
| | CAGGGGACCCAGGTCACCGTGTCATCC | |
| DR1459 DNA | GAAGTCCAGCTCGTGGAGTCTGGGGGTGGACTC | 734 |
| | GTACAAGCCGGGGGATCACTTCGCTTGTCCTGCGCGGC | |
| | TTCTGGCAGGACCATCTCAACTTACGCAATGGTTTGGTT | |
| | CAGGCAAGCCTCTGGTAAGGAGCGTGAGTTTGTGGGCG | |
| | TTATCTCCCGCAGTGGAGACCGCACTTACTATGCTGATT | |
| | CTGTGAAGGGCAGATTCACTATCAGTCGCGATAATCTG | |
| | GGCAACATTGTGCGTTTGCAGCTCAATTCACTTAAACCT | |
| | GAAGACACAGCCGTTTATTACTGCGCACGCGGCGGATA | |
| | TACCGGGATTGAGACAATTACGGCTCGGGGTCGCGGCA | |
| | CATTGGTCACCGTGTCCAGC | |
| DR1460 DNA | GAGGTTCAGCTCGTTGAGAGTGGTGGAGGCCTC | 735 |
| | GTGCAGACCGGGGATTCCCTTCGCCTTTCCTGTGCAGCT | |
| | CCAGAGTCCATCTTCAACAATAACGCCGTTTACTGGTAC | |
| | AGGCAGTTCCCCGGCAAGGAGAGGGAGTATGTTGGTCT | |
| | CATCACCATCGGTGGCAGGACCGGGTACGCGGACTCTG | |
| | TGAAAGGCCGCTTTACCATCTCCAGAGACAACGCCAAT | |
| | AACGTGGCCTTTTTGCAGATGGATTCCCTCAAGCCCGA | |
| | GGATACTGCTGTCTACTATTGTGCCACGGGCTTGAAGTT | |
| | CGGCTTCAACTTCTACAGTAAGACTGCCTACGACTACTG | |
| | GGGACAAGGGACCCAGGTGACCGTCAGCTCT | |
| DR1461 DNA | GAGGTGCAGCTCGTGGAGTCTGGAGGTCGCCTG | 736 |
| | GTGCAGGCTGGCGATTCCCTGCGCCTGTCCTGTGTGGCC | |
| | TCTGGTCGCATTTTCAACACTTATTCTATGGGTTGGTTC | |
| | AGACAGGTTCCTGGAAAGGAAAGAGACTTCGTGGCAGC | |
| | CATTCGGTGGAGTGGTGGCACCACTTATTACACAGACT | |
| | CCGTGAAGGGTCGCTTTACTATCTCTCGGGATAACGCC | |
| | AAAAACACTGTCTACCTCCAGATGAAAGACCTGAAGCC | |
| | CCAGGACACCGCCGTCTATTACTGTGCTGCCGTCCCCTC | |
| | TGGCCGCAGCTGGTACGGTCGCAACCGTTACTGGGGCC | |
| | AGGGCACTCTGGTGACCGTCAGCTCT | |
| DR1462 DNA | GAGGTGCAGTTGGTGGAGAGCGGCGGTGGCCTG | 737 |
| | GTCCAGGCGGGCGGGTCCCTCCGCCTGAGTTGTGTGTCT | |
| | TCAGGCCGGACCTTTGGATATGTCGCTATGGGTTGGTTC | |
| | CGTCAAGCCCCAGGTAAGGAACGCGAGTTCGTGGCGAG | |
| | CATTAACTGGAGCGGCGGGTCCACGGCCTATGCGGACT | |
| | CCGTAAAGGGCCGGTTCACTATCAGCCGCGACAACGCT | |
| | AAGAATACCGTGTACTTGCAGATGAACAGCCTGAAGCC | |
| | TGAGGATACAGCCGTGTATTACTGCGCTGGATCAACCC | |
| | GCTTCTATATCGCGACGATGGAACAGGGCTCCTACGAT | |
| | TACTGGGGCCAAGGTACTCAGGTGACCGTAAGCAGC | |
| DR1463 DNA | GAGGTGCAACTGGTGGAATCAGGAGGCTCCGTG | 738 |
| | GTCCAGCCAGGGGACAGCCTTCGTCTTGCCTGCACCGC | |
| | CTCTGGTCGCAGTTTCAGGTCTTACGCGATTGGCTGGTT | |
| | TAGGCAGGCATCCGGCAAGGAAAGGGTGTTTGTGGCTG | |
| | CCATCTCTTATGACGGTAGGCGCACCTACTATGGGCGTT | |
| | CATTGAAGGACCGTTTCACTATCTCTCGGGACAACGCT | |
| | AAGAACACAGTGTACTTGCAGATGAACTCCCTCAAGCC | |
| | CGAGGACACTGCCGTGTACTATTGCGCTACCCATCGCTC | |
| | CGGTACAATGTTCGCTCGGTATGGTATGGATTACTGGG | |
| | GTAAGGGTACTTTGGTTACCGTGTCCAGC | |
| DR1464 DNA | GAGGTGCAGCTGGTGGAGAGCGGCGGTGGCCTG | 739 |
| | GTGCAAGCAGGCGGATCTCTGCGTCTGTCTTGTGCTGCG | |
| | TCAGGCCGCACCTTCTCCTCTTATGCTATGGGGTGGTTT | |
| | AGACAAGCTCCTGGAAAGGAGAGGGAGTTTGTGACTGC | |
| | CATCTCCAGATCCGGTGGATACACTAGCTACGCCGATA | |
| | GTGTTAAGGGCCGGTTCACTATCTCTCGCGACAATGCC | |
| | AAGAACACCGTGTATCTTCAGATGAACTCCCTGAAACC | |
| | CGAGGACACCGCCGTCTACTATTGTGCGAAACTGATCG | |
| | CTCCATTCTATTACGGCATGGATTACTGGACCAAGGGG | |
| | ACCCAGGTGACAGTGTCTAGC | |
| DR1465 DNA | GAAGTGCAGCTGGTGGAAAGCGGCGGAGGTCTG | 740 |
| | ATGCAGGCAGGTGGAGCCCTTAGGCTCTCTTGTACCGC | |
| | CTCTGGGCCTACTTTTACCTCTTATACGATGGGCTGGTT | |
| | CCGCCAATCTCCTGGCAAGCGTCGCGAGTTTGTGGCCG | |
| | TCATCTCCAAAGGCGGGCGGACCTATTACGCCGACTCC | |
| | GTGAAGGGACGCTTCACTATTTCCCGCGACAACGCTAA | |
| | GAATACCTTCTATCTCCAGATGTCCTCTCTGAAGCCTGA | |
| | GGACACAGCAGTGTATTACTGCGCCGGGCAGCGTGTGG | |
| | GCGCGACTAGCAAGTATGAGTATGATTACTGGGGGCAG | |
| | GGCACCCAAGTGACCGTGTCATCC | |
| DR1466 DNA | GAAGTGCAACTGGTGGAGAGCGGAGGGGGTCTG | 741 |
| | GTACGCGCAGGTGGCTCCCTGAGGCTCTCCTGCGCTGC | |
| | GTCCGGCTTCACTTTTAGTACCGACTGGATGTACTGGGT | |
| | AAGACGCGCTCCAGGAAAGGGGCTGGAGTGGGTGTCCC | |
| | TTATCAACACTGACGGGACTTCTACCTCCTATACTAAGT | |
| | CTGTGAAGGGGCGCTTCACAGTCTCCCGCGATAATGCC | |
| | AAGAACACCTTGTACCTTCAGATGAACTCCCTCAAGCC | |
| | GGAGGACACAGCTCTGTATTACTGTGCACGCGGAAGAA | |
| | CCTACTGGTTTTACGCGATGGATTACTGGGGCAAGGGC | |
| | ACCCAGGTGACCGTCTCATCT | |
| DR1467 DNA | GAGGTCCAGTTGGTGGAATCTGGAGGCGGACTG | 742 |
| | GTGCAGGCTGGAGACAGTCTGAGATTGTCTTGTGCCGC | |
| | TTCTGGCCGGATCAGCAACTACGCAATGGGCTGGTTCC | |
| | GGCAGGCACCCGGTAAAGAAAGGGAGTTCGTCGCTGTC | |
| | ATCACCAGGAGCGGCGGAAGCACATACTATGCTGATAG | |
| | TGTTAAGGGCCGCTTCACCATTTCCAGAGATAACGGCA | |
| | AAAACACGATTGATCTTCAGATGAACAGACTGAAGCCT | |
| | GAAGACACAGCAGTGTACTATTGTGCCGTGAGGCGCAG | |
| | TCAAAAACTGGTAACCTTTGGCGCTGAGTATCCTTGGTG | |
| | GGGCCAGGGAACATTGGTGACTGTCAGCTCC | |
| DR1468 DNA | GAGGTGCAGTTGGTGGAGAGCGGCGGAGGCTTG | 743 |
| | GTTCAAGCTGGGGGCTCACTCAGGCTGTCTTGCACTACC | |
| | TCTGGGCGTACAGGCACCCATTATGCGATGGGTTGGTTT | |
| | AGGCAAGCGCCCGGCAAGGAACGCGAGTTCGTTAGTCT | |
| | CATCCTGTGGAACGGCGAGTTTACGACCTATAAAGATT | |
| | CTGTTAAGGGCCGCTTCACCATCTCCCGTGAGAAAGGC | |
| | GAAAACACGGTCTACTTGCAAATGAACTCTCTGAAACC | |
| | CGAGGATACTGCGGTGTATTACTGCTACCTGAGGGTGT | |
| | TTGCTAGGCGCTACTGGGGCCAGGGAACCCAGGTGACC | |
| | GTGTCCAGT | |
| DR1469 DNA | GAAGTGCAGCTGGTGGAAAGTGGAGGCGGACTG | 744 |
| | GTGCAGCCAGGGGGCAGCCTCCGCCTTTCTTGTGAGGT | |
| | GTCCGGCTTTACCTTCAGCAACTACTGGATGTACTGGAT | |
| | TCGCCAAGCCCCTGGGAAGGGACTGGAGTGGGTGTCCC | |
| | ACATTAACACCAACGGTGGCAACACTTATTACCGCCAT | |
| | AGTGTTAAAGGTAGATTCACTATCAGCAGGGATAACGC | |
| | TAAGAATACCCTGTACTTGCAGATGAACGGCCTGAAGT | |
| | CCGAGGACACCGCTGTGTATTACTGTGCCAAGGCTAAC | |
| | TCCGATGTCGGGTTGGGTTATTACGGCATGGATTACTGG | |
| | GGTAAGGGAACTCAGGTCACAGTGAGTTCT | |
| DR1470 DNA | GAGGTGCAGCTGGTGGAAAGTGGCGGGGGCTCT | 745 |
| | GTTCAGCCCGGCGGATCTCTGCGCCTGAGCTGTGCTGC | |
| | ACCAGAGTCCATCTTCAACAATAACGCTGTTTACTGGTA | |
| | TCGGCAATTTCCGGGCAAAGAAAGGGAGTACGTGGGCC | |
| | TCATCACGATTGGTGGGCGCACTGGATACGCCGACTCT | |
| | GTCAAGGGCCGCTTTACTATCAGTCGTGATAACGCCAA | |
| | CAATGTTGCTTTTCTCCAGATGGATAACCTGAAGCCGG | |
| | AAGATACTGCGGTATATTACTGTGCCGCTAGGCCTGGA | |
| | TATTGGTCCAGTTCCTACGATTATTGGGGTCAGGGAACC | |
| | CAAGTAACAGTGTCCTCT | |
| DR1471 DNA | GAAGTGCAGCTGGTGGAAAGCGGCGGTGGCCTC | 746 |
| | GTGCAGGCGGGCGGGTCCCTGAGACTGTCATGCGTCTT | |
| | CTCTGGCCGCGCCCCGGCTAGTTATGCAATGGCTTGGTT | |
| | TCGCCAGGCCGTGGGCAACGAGAGGGAGTTTGTCGCTG | |
| | CGATCAACTGGTCCGGCAGGCGCACTTACTATGCCGAC | |
| | TCAGTGAAGGGCCGCTTCACTATTTCCAAGGACAATGC | |
| | ACAGAACACCGCCTATCTCCAGATGACCAACTTGGAAC | |
| | CAGAGGATACTGCCACGTATTACTGTAATGCTTACTTGA | |
| | GCGGAACATATTACTGGGGCCAGGGCACCCAGGTGACC | |
| | GTCTCTAGC | |
| DR1472 DNA | GAGGTCCAGCTGGTCGAGTCTGGCGGTGGCTTG | 747 |
| | GTCCGCGCTGGGGACTCACTGCGCCTGAGTTGTGCTGT | |
| | GTCCGGCCTGGCCAGCTCCTCTTTCTTTATGACTTGGTT | |
| | CCGCCAAGGGCAGGGCAAGGAGCGGGAATTTGTGGCC | |
| | ACTATCAGTTGGACTGGCCGTACATCCTATTACGCTGCC | |
| | AGCGTGAAAGGCCGCTTTACCGTTAGTCGGGACAATGC | |
| | CAAGAATACCGTGTACCTTCAGATGAACTCTCTGAACT | |
| | CTGAGGATACAGCAGTCTACTTCTGTGCAGCCTACCCG | |
| | CGTACACTGGTGCGTAATCGCGAGCCGATCCATTGGGG | |
| | TCAGGGAACCCAGGTGACTGTGTCCTCC | |

TABLE 40
anti-IL2Rg VHH DNA sequences

| | | SEQ |
|---|---|---|
| | | ID |
| Name | Sequence | NO: |
| hIL2Rg_VHH-1 | CAGGTCCAGCTCCAGGAGAGC | 748 |
| | GGGGGCGGTTCTGTGCAAGCCGGAGG | |
| | CTCATTGAGACTCTCATGCGCTGCAAG | |
| | TGGTTTTACCTTCGATGACAGCGATAT | |
| | GGGATGGTATCGTCAGGCTCCGGGCAA | |
| | TGAGTGTGATCTGGTCTCCACTATCTCC | |
| | TCTGATGGTTCCACATACTATGCTGAC | |
| | TCTGTCAAGGGGCGCTTTACCATCTCC | |
| | CAAGATAATGCCAAGAACACCGTGTAC | |
| | CTTCAGATGGATTCAGTTAAGCCCGAG | |
| | GACACAGCCGTCTATTACTGCGCTGCG | |
| | GATTTTATGATTGCCATCCAAGCTCCC | |
| | GGAGCGGGATGCTGGGGCCAGGGAAC | |
| | CCAGGTCACTGTGAGCAGT | |
| hIL2Rg_VHH-2 | CAGGTGCAGTTGCAGGAGTCC | 749 |
| | GGCGGGGGTTCTGTGCCAGCGGGTGGG | |
| | AGCCTCAAGCTCTCCTGTGCCGCTTCC | |
| | GGCTTCTCATTCTCCTCTTACCCTATGA | |
| | CCTGGGCACGCCAAGCGCCCGGCAAG | |
| | GGACTGGAATGGGTGTCCACCATTGCT | |
| | TCCGATGGCGGTAGTACAGCCTACGCC | |
| | GCGTCAGTGGAGGGTCGGTTCACGATC | |
| | AGCCGGGACAACGCGAAGAGCACACT | |
| | CTACCTCCAGCTGAACTCTCTGAAGAC | |
| | CGAGGACACCGCCATGTACTATTGCAC | |
| | AAAGGGCTACGGCGACGGCACCCCGG | |
| | CACCCGGCCAGGGCACCCAGGTGACA | |
| | GTCTCTTCC | |
| hIL2Rg_VHH-3 | CAGGTGCAGTTGCAGGAAAGT | 750 |
| | GGTGGAGGGAGTGTGCAGACTGGGGG | |
| | CTCTCTCCGCCTCAGCTGCACAGCCTCT | |
| | GGATTTACCTTCGATGATCGCGAGATG | |
| | AACTGGTATCGCCAGGCTCCGGGAAAC | |
| | GAGTGCGAACTGGTGTCTACAATCAGT | |
| | TCTGACGGGTCCACCTATTACGCTGAT | |
| | AGTGTCAAGGGCCGCTTCACTATCTCT | |
| | CAGGACAACGCGAAGAACACCGTTTA | |
| | CTTGCAGATGGATAGCGTGAAGCCTGA | |
| | AGATACAGCGGTGTATTACTGCGCTGC | |
| | CGACTTTATGATTGCCATCCAGGCACC | |
| | GGGGGCGGGGTGTTGGGGACAGGGAA | |
| | CTCAGGTGACTGTGTCCTCC | |
| hIL2Rg_VHH-4 | CAGGTTCAACTCCAAGAGAGT | 751 |
| | GGTGGCGGAAGCGTGCAGGCGGGCGG | |
| | TTCTCTGCGTCTGAGTTGCACTGCCAG | |
| | CGGATTTACCTTCGACGATTCCGACAT | |
| | GGGATGGTACAGACAGGCCCCTGGTA | |
| | ACGAGTGCGAACTCGTGAGTACTATCA | |
| | GCTCCGACGGCAACACCTATTACACCG | |
| | ATTCTGTGAAGGGCAGGTTCACCATCT | |
| | CCCAGGACAACGCTAAGAACACTGTGT | |
| | ACCTGCAAATGAATAGCCTGGGACCCG | |
| | AGGACACAGCGGTCTATTACTGCGCGG | |
| | CAGAGCCGCGCGGCTATTACAGCAACT | |
| | ACGGCGGTAGACGCGAGTGCAACTACT | |
| | GGGGGCAGGGGACGCAAGTGACTGTC | |
| | TCCTCC | |
| hIL2Rg_VHH-5 | CAAGTGCAGCTTCAGGAGTCC | 752 |
| | GGGGGTGGCAGCGTCCAGGCTGGGGG | |
| | CAGCTTGCGCCTGTCTTGCGCTGCGTCT | |
| | GGGTTCAGCTTTAGCTCCTACCCTATG | |
| | ACCTGGGCTAGACAGGCCCCCGGCAA | |
| | GGGGCTGGAGTGGGTGAGTACAATCG | |
| | CCTCCGACGGAGGTAGTACGGCCTACG | |
| | CAGCGTCCGTCGAGGGTCGCTTCACCA | |
| | TCAGCCGGGATAACGCTAAGTCCACCC | |
| | TGTACCTTCAGCTCAATTCTCTCAAAA | |
| | CGGAGGATACCGCCATGTACTATTGCA | |
| | CCAAGGGATATGGCGACGGCACCCCA | |
| | GCTCCTGGACAGGGCACACAGGTCACC | |
| | GTTAGCTCC | |
| hIL2Rg_VHH-6 | CAGGTCCAGCTTCAGGAGTCTG | 753 |
| | GCGGGGGCGCAGTACAGGCAGGGGGT | |
| | TCTCTGCGTCTGTCCTGCGCCGCGTCCG | |
| | GCTTTACTTTCAGCAACGCACACATGA | |
| | GTTGGGTGCGCCAAGCGCCCGGCAAG | |
| | GGCCGGGAATGGATCAGTAGCATCTAC | |
| | AGTGGAGGCAGCACATGGTACGCCGA | |
| | CTCTGTTAAGGGTCGTTTTACGATCTCT | |
| | CGTGACAACTCCAAGAACACTTTGTAC | |
| | CTCCAGCTCAATTCTCTCAAGACCGAG | |
| | GACACCGCGATGTACTATTGTGCCGAG | |
| | AACAGGCTGCACTACTATTCCGACGAT | |
| | GACTCTCTCAGGGGCCAGGGAACTCAA | |
| | GTTACCGTGTCCAGC | |
| hIL2Rg_VHH-7 | CAAGTGCAGCTCCAAGAGAGT | 754 |
| | GGTGGCGGGCTGGTTCAGCCAGGGGG | |
| | CAGCTTGAGACTCTCCTGCGCAGCTTC | |
| | AGGCTTTACCTTCGATGACCGTGAGAT | |
| | GAACTGGTATCGTCAGGCCCCAGGCAA | |
| | CGAGTGTGAGCTGGTTAGCACGATTTC | |
| | TTCCGACGGTTCCACCTATTACGCCGA | |
| | CTCTGTGAAGGGACGTTTCACTATCTC | |
| | CCAGGACAATGCCAAGAACACCGTGT | |
| | ACCTCCAGATGGACAGCGTGAAGCCG | |
| | GAGGATACTGCTGTGTATTACTGCGCT | |
| | GCCGACTTTATGATCGCCATCCAGGCC | |
| | CCTGGCGCGGGTTGCTGGGGCCAGGGC | |
| | ACTCAGGTGACCGTGTCTTCC | |
| hIL2Rg_VHH-8 | CAAGTGCAACTGCAAGAGTCC | 755 |
| | GGCGGTGGATCTGTGCAGGCCGGAGG | |
| | CAGCCTGCGGCTGAGCTGTGTAGCTTC | |
| | CGGGTATACCTTTAGCTCATACTGTAT | |
| | GGGCTGGTTTCGTCAGGCCCCCGGTAA | |
| | GGAGCGCGAGGGCGTGGCCGCTCTTGG | |
| | TGGAGGCTCCACCTATTACGCCGATTC | |
| | CGTGAAGGGCAGGTTTACTATCTCCCA | |
| | GGACAACGCGAAGAATACGCTCTATCT | |
| | CCAGATGAATAGCCTGAAGCCCGAGG | |
| | ATACAGCTATGTATTACTGTGCTGCCG | |
| | CTTGGGTAGCCTGCCTGGAGTTCGGTG | |
| | GCTCCTGGTACGATCTGGCACGGTACA | |
| | AACATTGGGGGCAGGGCACCCAGGTC | |
| | ACCGTGTCTAGC | |
| hIL2Rg_VHH-9 | CAGGTCCAGTTGCAGGAATCTG | 756 |
| | GGGGCGGTTCCGTACAAGCAGGTGGCT | |
| | CCCTTCGGTTGAGCTGTACCGCATCCG | |
| | GCTTTACTTTCGACGATAGCGATATGG | |
| | GCTGGTATCGTCAGGCCCCAGGGGGCG | |
| | AGTGCGAGCTGGTTACAATCTCCTCTG | |
| | ACGGCAGTACCTATTACGCAGACTCCG | |
| | TCAAGGGCAGGTTCACTATCAGTCAGG | |
| | ACAATGCAAAGAACACTGTGTATCTCC | |
| | AGATGAACTCTCTGAAGCCAGAAGATA | |
| | CTGCCGTGTATTACTGCGCTGCGGAAC | |
| | CGAGAGGCTATTACTCTAATTATGGCG | |
| | GGCGTCGGGAGTGTAATTATTGGGGAC | |
| | AGGGAACCCAGGTGACCGTGTCCTCC | |
| hIL2Rg_VHH-10 | CAGGTGCAGCTCCAGGAGAGT | 757 |
| | GGCGGAGGCTCCGTGCAGGCTGGGGG | |
| | CTCTCTGCGTCTGAGCTGTGCCGCAAG | |
| | CGGTAGCATTTACAGCTCTGCCTACAT | |
| | CGGGTGGTTTCGTCAAGCGCCGGGCAA | |
| | AAAGCGCGAAGGCGTGGCCGGAATCT | |
| | ACACGCGCGATGGCTCCACCGCTTATG | |
| | CTGACAGCGTTAAGGGACGTTTTACGA | |
| | TCAGCCAGGACTCTGCCAAAAAGACTG | |
| | TGTATCTCCAGATGAACTCCCTGAAAC | |
| | CTGAGGACACAGCCATGTATTACTGCG | |
| | CCGCTGGCCGCCGTACAAAGAGCTATG | |
| | TTTACATCTTTCGCCCCGAAGAGTACA | |
| | ACTACTGGGGCCAGGGAACCCAAGTG | |
| | ACTGTGTCCAGT | |
| hIL2Rg_VHH-11 | CAGGTTCAGTTGCAGGAGTCCG | 758 |
| | GCGGAGGCAGCGTGCAGGCCGGAGGC | |
| | TCCTTGCGCTTGTCCTGTGCGGCTTCTG | |
| | GCTTCACCTTCTCATCTGCTCACATGAG | |
| | TTGGGTGCGTCAGGCCCCAGGGAAAG | |
| | GTCGCGAGTGGATTGCCTCCATCTACA | |
| | GCGGTGGGGGCACTTTTTATGCGGACA | |
| | GCGTGAAGGGCCGCTTTACCATCAGCC | |
| | GTGACAACGCTAAGAACACCCTGTATC | |
| | TCCAACTCAATTCCCTCAAGACCGAGG | |
| | ATACAGCGATGTACTATTGTGCAACCA | |
| | ACCGCCTTCACTATTACTCCGACGATG | |
| | ACAGCCTGCGCGGACAGGGGACCCAG | |
| | GTGACGGTGTCCAGC | |
| hIL2Rg_VHH-12 | CAGGTGCAACTCCAGGAAAGT | 759 |
| | GGCGGAGGCTCAGTGCAGGCAGGTGG | |
| | CTCTCTCCGCCTTTCCTGCGCTGCCAGC | |
| | GGATTCACCTTCTCTAACGCTCACATG | |
| | AGCTGGGTTCGTCAGGCTCCCGGCAAA | |
| | GGCCGTGAATGGATTAGCTCCATCTAT | |
| | AGTGGCGGAAGTACTTGGTACGCAGAT | |
| | AGCGTCAAGGGCCGCTTCACTATTAGT | |
| | CGGGATAACTCCAAGAACACTCTGTAC | |
| | CTCCAGCTGAACTCATTGAAAACCGAG | |
| | GACACGGCTATGTACTATTGTGCTGAG | |
| | AACAGGCTGCACTATTACTCCGACGAT | |
| | GACTCTCTGAGGGGTCAGGGCACCCAG | |
| | GTGACCGTCAGCTCC | |
| hIL2Rg_VHH-13 | CAGGTCCAACTCCAGGAGTCC | 760 |
| | GGCGGAGGCAGCGTGCAGGCTGGAGG | |
| | CTCTCTCCGCCTGAGCTGCACAGCTTC | |
| | CAGATTCATCTTCGATGACTCCGACAT | |
| | GGGCTGGTATCGCCAGGCTCCAGGGAA | |
| | CGAGTGCGAACTGGTGAGCACCATCTC | |
| | TTCAGACGGTAGCACCTATTACGCCGA | |
| | CAGTGTGAAGGGGCGCTTCACCATCTC | |
| | CCGCGACAATGCTAAAAATACGGTGTA | |
| | TCTCCAGATGAACTCCCTCAAACCGGA | |
| | GGACACAGCTGTATATTACTGTGCTGC | |
| | GGAACCACGGGGCTACTATAGCAACTA | |
| | TGGTGGAAGGCGCGAGTGCAACTACTG | |
| | GGGTCAGGGCACACAGGTGACGGTTTC | |
| | CTCC | |
| hIL2Rg_VHH-14 | CAGGTGCAGCTCCAGGAGAGC | 761 |
| | GGCGGTGGCTCCGTGCAGGCTGGTGGC | |
| | AGCCTGAAGCTGTCCTGCACCGTGAGT | |
| | GGCTTCACAGCCGACGATTCTGATATG | |
| | GGCTGGTATCGCCAAGGCCCCGGCAAT | |
| | GAGTGCGAGCTGGTAACCATTAGCTCA | |
| | GACGGCTCTACATACTATGCCGATTCT | |
| | GTTAAGGGCCGCTTTACTATCTCACAG | |
| | GATAATGCCAAGAACACAGTGTACTTG | |
| | CAGATGAACTCTCTGAAACCGGAAGAC | |
| | ACAGCTGTGTATTACTGTGCTGCGGAG | |
| | CCTAGAGGGTATTACAGCAATTACGGG | |
| | GGCCGGAGAGAGTGTAACTATTGGGG | |
| | GCAGGGCACCCAAGTGACCGTTTCCTC | |
| | C | |
| hIL2Rg_VHH-15 | CAGGTCCAGCTTCAGGAATCTG | 762 |
| | GGGGCGGTCTCGTGCAGCCCGGCGGGT | |
| | CCCTGCGTCTGTCTTGTGCTGCGAGCG | |
| | GCTTCACGTTCTCAAGTGCCCACATGA | |
| | GCTGGGTAAGGCAGGCACCGGGCAAG | |
| | GGGCGCGAGTGGATTGCAAGCATCTAT | |
| | TCAGGCGGGGGCACATTCTACGCCGAC | |
| | AGCGTGAAGGGACGTTTTACAATCTCC | |
| | AGAGATAACGCAAAGAACACTCTCTAC | |
| | CTCCAACTCAACTCCTTGAAGGCGGAA | |
| | GATACTGCAATGTATTACTGTGCTACT | |
| | AACCGTCTTCATTATTACTCTGACGAT | |
| | GACTCCCTGCGGGGGCAGGGTACACA | |
| | GGTGACAGTGAGTTCC | |
| hIL2Rg_VHH-16 | CAGGTGCAGCTGCAAGAATCT | 763 |
| | GGTGGAGGGCTGGTCCAGCCTGGGGG | |
| | CTCCCTGCGCCTCTCATGTGTCGCATCT | |
| | GGCTTCACCTTCAGCAACGCCCACATG | |
| | AGCTGGGTTCGCCAAGCCCCTGGGAAG | |
| | GGCCGGGAGTGGATCTCCAGTATCTAT | |
| | TCCGGCGGAAGCACTTGGTATGCAGAC | |
| | AGCGTCAAAGGACGGTTCACTATTTCT | |
| | CGTGATAATTCTAAGAACACCCTGTAC | |
| | CTTCAGCTGAACAGCCTGAAGACCGAG | |
| | GACACTGCTATGTACTATTGTGCTGAG | |
| | AATCGCCTGCATTACTATAGCGACGAT | |
| | GACAGTCTGCGCGGACAGGGGACCCA | |
| | GGTCACCGTGTCCTCT | |
| hIL2Rg_VHH-17 | CAGGTTCAGTTGCAGGAATCA | 764 |
| | GGAGGCGGTCTGGTGCAGCCTGGGGG | |
| | CTCTCTGCGTCTCTCCTGCGCCGCTTCC | |
| | GGCTTCACATTCTCCAACGCCCACATG | |
| | AGCTGGGTCCGCCAGGCCCCTGGGAAG | |
| | GGCCGCGAGTGGATCTCCAGTATCTAC | |
| | AGCGGGGGCTCCACTTGGTACGCAGAC | |
| | AGCGTCAAAGGGAGGTTTACCATTAGC | |
| | CGTGACAATTCTAAGAACACATTGTAT | |
| | TTGCAGCTGAACTCTCTTAAAACCGAG | |
| | GACACCGCCATGTACTATTGTGCTGAG | |
| | AACAGGCTCCACTATTACTCAGACGAT | |
| | GACTCACTTCGCGGGCAGGGAACCCAG | |
| | GTCACCGTCTCCTCT | |
| hIL2Rg_VHH-18 | CAAGTCCAGCTCCAGGAAAGC | 765 |
| | GGCGGTGGCCTGGTGCAACCTGGCGGG | |
| | TCTCTGCGCTTGTCATGCGCTGCCTCCG | |
| | GCTTCACCTTCTCATCTTACCCTATGAC | |
| | CTGGGCGCGTCAGGCTCCCGGCAAGGG | |
| | ATTGGAGTGGGTGTCTACTATTGCCTC | |
| | CGACGGTGGCAGCACGGCCTACGCAG | |
| | CGTCTGTAGAAGGACGCTTCACAATTA | |
| | GCAGAGACAACGCAAAATCTACTTTGT | |
| | ACCTTCAGCTCAACAGCCTGAAGACCG | |
| | AAGACACAGCTATGTATTACTGCACAA | |
| | AAGGCTACGGGGACGGCACGCCAGCG | |
| | CCTGGACAGGGGACACAGGTGACCGT | |
| | ATCTTCT | |
| hIL2Rg_VHH-19 | CAGGTGCAGTTGCAGGAATCA | 766 |
| | GGGGGTGGCTCTGTGCAGGCCGGGGG | |
| | CTCCCTGCGTCTGTCCTGTACTGCGAG | |
| | CGGCTTCACCTTTGATGACCGCGAGAT | |
| | GAACTGGTATCGCCAGGCTCCGGGGAA | |
| | CGAGTGCGAACTCGTGTCTACAATTAG | |
| | CTCCGATGGTTCAACATACTATGCTGA | |
| | TTCTGTCAAAGGTCGCTTTACCATCTCA | |
| | CAGGACAACGCCAAGAACACCGTCTA | |
| | CCTCCAGATGGACTCTGTGAAGCCTGA | |
| | AGATACCGCCGTATACTATTGCGCCGC | |
| | TGACTTTATGATTGCCATTCAGGCTCC | |
| | GGGTGCTGGATGCTGGGGTCAGGGGA | |
| | CTCAGGTGACCGTGTCTTCA | |
| hIL2Rg_VHH-20 | CAAGTGCAGTTGCAGGAAAGC | 767 |
| | GGCGGTGGGTCCGTGCAAGCCGGAGG | |
| | TTCTCTCCGCCTGTCTTGCACTGCCTCA | |
| | GGTTTTACCTTCGACGATTCCGATATG | |
| | GGCTGGTACAGGCAGGCTCCCGGCAAT | |
| | GAGTGCGAGCTGGTGTCTACGATCTCA | |
| | AGTGATGGCTCCACCTACTATGCCGAT | |
| | AGCGTAAAAGGAAGGTTTACTATTAGC | |
| | CAGGATAACGCGAAGAACACGGTGTA | |
| | CCTCCAGATGAACAGTCTCAAGCCGGA | |
| | GGATACTGCCGTGTATTACTGTGCTGC | |
| | CGAGCCGCGTGGCTATTACTCCAACTA | |
| | CGGTGGCAGACGTGAATGCAATTACTG | |
| | GGGACAGGGTACTCAGGTTACCGTGTC | |
| | CTCT | |
| hIL2Rg_VHH-21 | CAGGTTCAACTTCAGGAATCCG | 768 |
| | GGGGCGGTTCCGTGCAAGCCGGGGGT | |
| | AGCCTGCGTCTGTCTTGCGTGGCCAGC | |
| | GGCTATACCTCCTGTATGGGTTGGTTTC | |
| | GGCAGGCTCCTGGGAAGGAGCGCGAA | |
| | GCCGTGGCGACCATCTACACACGGGGC | |
| | CGCAGCATCTATTACGCTGACAGTGTG | |
| | AAGGGCCGCTTCACCATCTCCCAGGAT | |
| | AACGCCAAGAATACCCTGTATCTGCAA | |
| | ATGAACTCCCTGAAGCCTGAGGACATC | |
| | GCCATGTATTCCTGCGCAGCTGGAGGG | |
| | TACTCATGGTCCGCTGGGTGCGAGTTT | |
| | AATTATTGGGGCCAAGGAACCCAGGTG | |
| | ACCGTCTCCTCA | |
| hIL2Rg_VHH-22 | CAAGTGCAGCTCCAGGAGTCT | 769 |
| | GGCGGGGGCCTGGTTCAGCCTGGTGGG | |
| | TCCCTGCGCCTGTCTTGCACGGCTTCCG | |
| | GCTTTAGCTTCTCCTCATATCCAATGAC | |
| | CTGGGCACGCCAGGCTCCTGGTAAGGG | |
| | CCTGGAGTGGGTCTCCACCATCGCCTC | |
| | TGATGGTGGGTCAACTGCCTATGCTGC | |
| | CTCCGTCGAGGGTAGATTCACAATCAG | |
| | CAGAGACAACGCCAAATCCACGCTGTA | |
| | CCTGCAACTCAACTCCTTGAAGACCGA | |
| | GGACACAGCTATGTATTACTGTACCAA | |
| | AGGCTACGGCGACGGCACTCCTGCTCC | |
| | CGGACAGGGGACCCAGGTGACTGTGTC | |
| | TAGC | |
| hIL2Rg_VHH-23 | CAGGTCCAACTTCAGGAAAGC | 770 |
| | GGGGGTGGACTGGTACAGCCAGGGGG | |
| | CAGTCTGCGCCTGTCCTGTGCCGCAAG | |
| | CGGGTTTTCTTTCTCCAGTTACCCCATG | |
| | ACCTGGGCTCGCCAAGCACCTGGAAAG | |
| | GGACTGGAGTGGGTGTCTACTATTGCG | |
| | TCAGATGGTGGGAGTACGGCTTACGCC | |
| | GCGAGCGTGGAGGGTCGTTTTACGATC | |
| | AGTAGGGACAACGCCAAAAGCACTCT | |
| | GTACCTCCAGCTTAACAGCCTGAAGAC | |
| | CGAGGACACCGCCATGTATTACTGTAC | |
| | CAAGGGCTACGGAGACGGCACCCCTG | |
| | CGCCGGGGCAAGGCACCCAGGTGACC | |
| | GTAAGTTCA | |

TABLE 41
murine anti-IL2Rg VHH DNA sequences

| | | SEQ |
|---|---|---|
| | | ID |
| Name | DNA Sequence | NO: |
| mIL2Rg_ | CAGGTGCAACTCCAGGAGTCCGGCGGGGGCT | 771 |
| VHH1 | CCGTGCTGGCTGGCGGATCTTTGAGGCTGTCTTGCGT | |
| | GGCTTCTGGCTATGGCTATAATTACATCGGCTGGTTC | |
| | CGTCAGACACCCGGCAAGGAGCGCGAAGGGGTGGC | |
| | GGTCATTTACACAGGGGGTGGGGACACTTATTACGC | |
| | CGACTCCGTCAAGGGTAGGTTTACCGCTAGTCGCGAT | |
| | AATGCCAAAAGTACGCTGTACCTGCAAATGAACAGC | |
| | TTGGAGCCAGAGGACACCGCCATGTATTACGGAGTG | |
| | GCTCGCTACTGTGTGGGCAGTGTGTACGCTTGCCTGC | |
| | GCGGAGGCCACGACGAGTACGCACACTGGGGCCAGG | |
| | GAACCCAGGTGACAGTGTCTAGC | |
| mIL2Rg_ | CAGGTGCAGCTCCAGGAGTCTGGGGGTGGCA | 772 |
| VHH2 | GCGTCCAGCCAGGTGGCTCATTGAGACTGTCTTGTGC | |
| | TGCATCTGGCTCCACCTACGCTAATTACCTGATGGGA | |
| | TGGTTCAGGCAGGCCCCTGGTAAGGAGCGTGAGGGC | |
| | GTGGCCGCTATCTATTCTGGCGGTGGGTCCACCTACT | |
| | ATGCTGACTCCGTCAAGGGACGCTTCACTATTTCTCA | |
| | AGACAATGCCAAGAACACTTTGTACTTGCAAATGAA | |
| | CTCACTCAAACCTGAGGACACCGCGATGTACTATTGC | |
| | GCAGCGGCATCCGCAGTGAAGGGAGACAAAGGGGA | |
| | TATCGTGGTAGTTGTGACCGGCACCCAGCGTATGGA | |
| | GTACGACTACTGGGGACATGGCACCCAGGTGACAGT | |
| | TAGCTCC | |
| mIL2Rg_ | CAGGTACAGTTGCAGGAGAGTGGTGGGGGTT | 773 |
| VHH3 | CCGTCCAGGCCGGTGCCTCTCTTCGCCTCAGTTGTAG | |
| | CGTGAGCGGTTTCACGTTCGACGAGTCAGTGATGTCC | |
| | TGGTTGCGCCAGGGTCCCGGCAATGAGTGCGACGCG | |
| | GTCGCTATTATCAGCTCCGATGACAACACCTATTACG | |
| | ACGATAGCGTGAAAGGCCGCTTTACCATCTCCGAGG | |
| | ACAACGCCAAAAACATGGTGTATCTGCAAATGAACT | |
| | CACTGAAGCCGGAAGACACCGCAGTGTACTATTGCG | |
| | CCGCGCGTCGGCGCAGACCTGTGTACGATTCCGATTA | |
| | TGAACTCCGGCCACGTCCGCTGTGTGGCGATTTCGGC | |
| | GTGTGGGGCCAGGGGACCCAGGTGACGGTCTCCTCC | |
| mIL2Rg_ | CAGGTGCAGCTCCAGGAATCTGGCGGGGGCT | 774 |
| VHH4 | CTGTGCAGGCTGGTGGCTCCCTTCGCCTGTCCTGTAT | |
| | TGGCTCCGGTCTTCCTTTCGACGAGGATGACATGGGC | |
| | TGGTATCGCCAGGCCCCTGGGAATGAGTGTGAATTG | |
| | GTCAGCTCAATCTCCAGTGACGGCACCGCCTATTACG | |
| | CCGATTCCGTCAAGGGACGCTTCACTATCTCCAGAGA | |
| | CAACGCCAAGAACACTGTGCTGTTGCAGATGAACTC | |
| | CCTGAAGCCCGAGGATACCGCTGTCTATTACTGCGCA | |
| | GCCGGGGTCCACAGACAGTTCGGCGGTTCCAGTTCCT | |
| | GCGGCGACGCCTTCTACGGCATGGATTACTGGGGCA | |
| | AGGGAACTCAGGTCACAGTGTCTTCC | |
| mIL2Rg_ | CAGGTTCAGCTTCAGGAGTCCGGCGGGGGCT | 775 |
| VHH5 | CCGTACAGGCAGGGGGCTCACTGCGTCTTTCCTGTGT | |
| | GGCGAGTGGCGACGTGTATGGCCGTAACAGCATGGC | |
| | TTGGTTCCGGCAGGCACCTGGAAAGGAACGCGAGGG | |
| | CGTTGCAGTTGGGTATTCCGTAGTGACAACCACTTAC | |
| | TATGCCGACAGTGTGAAGGGCCGGTTTACGATCTCA | |
| | GAGGACAACGATAAAAACACAGTGTACCTGGAGATG | |
| | AACTCCCTGAAGCCGGAAGACACTGCTATGTATTACT | |
| | GCGCTGCCGATGGCAACCTGTGGCGCGGACTCAGGC | |
| | CCTCCGAGTACACTTATTGGGGTCAGGGCACCCAGG | |
| | TGACCGTTTCAAGT | |
| mIL2Rg_ | CAGGTCCAGCTTCAGGAGTCAGGTGGCGGTA | 776 |
| VHH6 | GTGTCCAGGCAGGCGGTAGCCTGCGCCTTAGCTGTG | |
| | CTACATCCGGCTTCCCTTACTCACGCTATTGTATGGG | |
| | CTGGTTCAGGCAAGCTCCCGGTAAAGAGCGCGAGGG | |
| | AGTGGCAGCCATCGAGCCTGACGGGAGCACATCTTA | |
| | TGCTGACTCTGTAAAGGGGCGTTTCACCATCTCTCAG | |
| | GACAACGCCGTTAATACACTGTACTTGCAAATGAAT | |
| | AACCTGAAGCCCGAGGACACAGCTATGTATTACTGC | |
| | GCAGCCGACGAGCGTTGCTTCTATTTGAAGGACTATG | |
| | ACCTCAGAAGGCCAGCCCAGTACCGCTACTGGGGGC | |
| | AGGGCACCCAGGTTACCGTGTCATCT | |
| mIL2Rg_ | CAGGTGCAGTTGCAGGAGAGTGGCGGTGGCC | 777 |
| VHH7 | TCGTGCAGCCTGGCGGAAGCCTCCGTCTGAGCTGCA | |
| | CTGTGTCCGGCTTCACTTTCGACGAGAGCGACATGGG | |
| | CTGGCTGAGGCAGAACCCTGGTAACGAGTGCGGCGT | |
| | TGTGAGTGTCATCACGTCTGATGACAACCCATACTAT | |
| | GATGACAGCGTCAAGGGCCGCTTTACTATCTCCGAG | |
| | GATAACGCCAAGAACATGGTGTACCTCCAGATGAAC | |
| | TCACTGAAGCCCGAGGATACCGGCGTTTATTACTGTG | |
| | CAACCAGGAGCCGTCAGCCTGTGTACTCACGCGATT | |
| | ACGAGCTGCGGCCCCGCCCCCTCTGTGGAGACTTTGG | |
| | TGTGTGGGGCCAGGGCACCCAGGTGACTGTTTCCAG | |
| | C | |
| mIL2Rg_ | CAGGTGCAGTTGCAGGAGAGTGGAGGGGGCT | 778 |
| VHH8 | CAGTGCAGGCTGGCGGGTCCTTGCGTCTGTCTTGCAC | |
| | CGCCTCTGGCTTCACCTTCGATGACTTCGATATGGGT | |
| | TGGTATCGCCAGGCTCCAGGGAACGAGTGCGAATTG | |
| | GTCAGCACTATCAGCGACGATGGCTCAACATATTAC | |
| | GCCGACTCTGTGAAGGGACGGTCTAGCATTAGCCGG | |
| | GACAACGCAAAGAACACCGTCTATCTCCAGATGAAC | |
| | CGCTTGAAGCCTGAGGATACCGGAGTCTATTACTGC | |
| | GCCGCTGAGGGCGCGTTGGGCTCCAAGACTAATTGT | |
| | GGCTGGGTGGGCAACTTCGGATATTGGGGCCAGGGA | |
| | ACACAGGTTACCGTTTCCAGC | |
| mIL2Rg_ | CAGGTGCAGTTGCAGGAGTCTGGAGGCGGTT | 779 |
| VHH9 | CCGTTCAGGCCGGGGGCTCTCTGCGCCTGTCCTGCGC | |
| | TGCCTCCGGGTTTACATTTGACGATTTCGATATGGGC | |
| | TGGTATCGCCAGGCCCCTGGCAACGAGTGCGAACTG | |
| | GTGTCTACTATCTCCGATGACGGCTCAACCTACTATG | |
| | CAGACTCCGTAAAGGGCAGATCCAGCATCTCCCGCG | |
| | ACAATGCCAAAAACACTGTGTACCTCCAGATGAACT | |
| | CCCTCAAGCCTGAGGATACGGCGGTGTACTATTGTGC | |
| | TGCCGAGGGTGCGCTCGGTAGCAAGACTAATTGCGG | |
| | CTGGGTGGGCAACTTCGGGTACTGGGGTCAGGGGAC | |
| | CCAGGTAACCGTGTCTTCT | |
| mIL2Rg_ | CAGGTGCAGTTGCAGGAAAGCGGTGGGGGCC | 780 |
| VHH10 | TGGTGCAGCCCGGAGGCAGCCTGCGCTTGAGCTGCG | |
| | CTGCCTCTGGCTTCACATTCGATGACTTCGATATGGG | |
| | CTGGTATCGTCAAGCACCCGGAAACGAGTGCGAGCT | |
| | GGTGAGTACAATCAGTGATGACGGATCTACCTACTA | |
| | TGCCGACAGCGTCAAGGGAAGATCCAGCATCAGTCG | |
| | CGACAACGCCAAGAGCACCGTTTACCTCCAGATGAA | |
| | CCGCCTCAAGCCTGAGGACACAGGAGTCTATTACTG | |
| | TGCTGCGGAGGGGGCCTTGGGCAGCAAGACTAACTG | |
| | TGGATGGGTGGGAAACTTCGGGTATTGGGGTCAGGG | |
| | TACACAGGTCACAGTGTCTTCA | |
| mIL2Rg_ | CAAGTTCAGCTTCAGGAAAGTGGGGGCGGGC | 781 |
| VHH11 | TGGTGCAGCCAGGGGGTTCCCTGAAGCTGAGCTGCG | |
| | CTGCCTCTGGGTTTACATTCTCTGATCGCGACATGGG | |
| | CTGGTATCGCCAAGCGCCGGGCAATGAATGCGAAAG | |
| | AGTGAGTACTATTTCTGACGATGGTTCTACTTACTAT | |
| | GCTGACTCCGTGAAGGGCCGTAGCTCCATTTCCAGG | |
| | GACAACGCGAAGAACACCGTATACCTCCAGATGAAC | |
| | TCTCTGAAGCCCGAGGACACCGCTGTGTATTACTGCG | |
| | CTGCCGAGGGGGCTCTCGGCTCAAAGACCAACTGCG | |
| | GATGGGTCGGTAACTTCGGCTACTGGGGCCAGGGCA | |
| | CCCAAGTGACAGTCTCCTCC | |
| mIL2Rg_ | CAGGTCCAGTTGCAGGAGAGCGGGGGTGGAA | 782 |
| VHH12 | GCGTCCTCGCCGGAGGGAGCCTCCGTTTGAGCTGCGT | |
| | CGCCTCAGGCTACGGCTACAATTACATCGGATGGTTC | |
| | AGACAGACGCCTGGTAAAGAGCGGGAAGGCGTCGCC | |
| | GTGATTTATATCGGTGGCGGAGACACCTATTACGCTG | |
| | ACTCAGTGAAGGGGCGTTTCACCGCAAGCCGGGACA | |
| | ACGCTAAGAGCACCCTGTACCTCCAGATGAACTCTCT | |
| | CGAACCTGAGGACACTGCAATGTATTACTGCGTGGC | |
| | TCGTTACTGCGTCGGGAGTGTCTACGCCTGCCTGAGG | |
| | GGCGGGCATGATGAGTATGCCCACTGGGGACAAGGA | |
| | ACACAGGTGACTGTCTCCAGT | |
| mIL2Rg_ | CAGGTTCAGCTCCAGGAGTCTGGTGGCGGTTC | 783 |
| VHH13 | CGTGCTGGCCGGGGGCTCTCTGCGCCTGTCTTGTGTC | |
| | GCCTCAGGGTACGGCTATAACTACATTGGCTGGTTCA | |
| | GACAGACCCCTGGGAAAGAGCGGGAGGGTGTGGCTG | |
| | TCATTTACACCGGCGGAGGCGACACCTACTATGCCG | |
| | ATTCAGTTAAGGGCAGGTTTACCGCGAGCCGTGACA | |
| | ACGCGAAGTCTACTCTGTACCTGCAAATGAACAGCC | |
| | TGGAACCTGAGGATACTGCGATGTACTATTGTGTGGC | |
| | CCGGTACTGCGTAGGCTCAGTGTATGCCTGCCTGCGC | |
| | GGGGGTCACGACGAGTACGCACACTGGGGACAGGG | |
| | AACTCAGGTCACCGTGTCTAGC | |
| mIL2Rg_ | CAGGTGCAACTCCAGGAGTCCGGCGGGGGCT | 784 |
| VHH14 | CCGTCCAAGCTGGTGGCTCACTGAGGCTTAGCTGTGC | |
| | TGCCTCCGGCTTTACTTTCGACGATTTCGACATGGGT | |
| | TGGTATCGCCAGGCTCCGGGCAATGAGTGCGAGCTG | |
| | GTCTCTACCATTTCCGATGACGGCTCTACCTACTATG | |
| | CCAACAGTGTTAAGGGTAGGTCTTCCATCTCCCGCGA | |
| | CAACGCTAAGAATATGGTGTACTTGCAGATGAACTC | |
| | TCTGAAGCCTGAGGACACTGCTGTCTACTATTGCGCT | |
| | GCCGAAGGTGCCCTGGGCTCAAAGACTAATTGCGGC | |
| | TGGGTCGGTAACTTTGGCTACTGGGGTCAGGGGACT | |
| | CAGGTGACCGTCAGCTCC | |
| mIL2Rg_ | CAGGTCCAGTTGCAGGAAAGCGGCGGGGGCT | 785 |
| VHH15 | CTGTTCAGGCAGGCGGAAGCCTTCGTCTGTCCTGTAC | |
| | TGCCAGTGGTTTCACCTTTGATGACTTTGACATGGGC | |
| | TGGTATCGGCAAGCCCCCGGAAACGAGTGCGAGCTG | |
| | GTATCCACCATTTCCGATGACGGGTCCACGTACTATG | |
| | CTGATAGCGTGAAGGGCAGGTCTTCCATCAGCCGGG | |
| | ACAACGCCAAGAACACAGTGTATTTGCAGATGAACC | |
| | GCCTCAAGCCAGAAGACACCGGGGTATATTACTGTG | |
| | CAGCGGAAGGTGCCCTGGGTAGCAAGATGAACTGCG | |
| | GATGGGTGGGTAATTTTGGATACTGGGGCCAGGGCA | |
| | CGCAGGTTACAGTGTCCAGC | |

1. An 112 receptor (IL2R) binding protein that specifically binds to IL2Rβ and IL2Rγ, comprising an anti-IL2Rβ VHH antibody and an anti-IL2Rγ VHH antibody.

2. The IL2R binding protein of claim 1, wherein the anti-IL2Rβ VHH antibody comprises a complementarity determining region 1 (CDR1) comprising an amino acid sequence of SEQ ID NO: 1 or SEQ ID NO: 410, a CDR2 comprising an amino acid sequence of SEQ ID NO: 2, and a CDR3 comprising an amino acid sequence of SEQ ID NO: 3; and wherein the anti-IL2Rγ VHH antibody comprises:
i) a CDR1 comprising an amino acid sequence of SEQ ID NO: 41 or SEQ ID NO: 420, a CDR2 comprising an amino acid sequence of SEQ ID NO: 42, and a CDR3 comprising an amino acid sequence of SEQ ID NO: 43;
ii) a CDR1 comprising an amino acid sequence of SEQ ID NO: 45 or SEQ ID NO: 421, a CDR2 comprising an amino acid sequence of SEQ ID NO: 46, and a CDR3 comprising an amino acid sequence of SEQ ID NO: 47;
iii) a CDR1 comprising an amino acid sequence of SEQ ID NO: 49 or SEQ ID NO: 422, a CDR2 comprising an amino acid sequence of SEQ ID NO: 50, and a CDR3 comprising an amino acid sequence of SEQ ID NO: 51;
iv) a CDR1 comprising an amino acid sequence of SEQ ID NO: 53 or SEQ ID NO: 423, a CDR2 comprising an amino acid sequence of SEQ ID NO: 54, and a CDR3 comprising an amino acid sequence of SEQ ID NO: 55;
v) a CDR1 comprising an amino acid sequence of SEQ ID NO: 57 or SEQ ID NO: 424, a CDR2 comprising an amino acid sequence of SEQ ID NO: 58, and a CDR3 comprising an amino acid sequence of SEQ ID NO: 59;
vi) a CDR1 comprising an amino acid sequence of SEQ ID NO: 61 or SEQ ID NO: 425, a CDR2 comprising an amino acid sequence of SEQ ID NO: 62, and a CDR3 comprising an amino acid sequence of SEQ ID NO: 63;
wherein each CDR independently comprises 0, 1, 2, or 3 amino acid changes relative to the sequence.

3. The IL2R binding protein of claim 1, wherein the anti-IL2Rβ VHH antibody comprises a complementarity determining region 1 (CDR1) comprising an amino acid sequence of SEQ ID NO: 5 or SEQ ID NO: 411, a CDR2 comprising an amino acid sequence of SEQ ID NO: 6, and a CDR3 comprising an amino acid sequence of SEQ ID NO: 7; and wherein the anti-IL2Rγ VHH antibody comprises:
i) a CDR1 comprising an amino acid sequence of SEQ ID NO: 41 or SEQ ID NO: 420, a CDR2 comprising an amino acid sequence of SEQ ID NO: 42, and a CDR3 comprising an amino acid sequence of SEQ ID NO: 43;
ii) a CDR1 comprising an amino acid sequence of SEQ ID NO: 45 or SEQ ID NO: 421, a CDR2 comprising an amino acid sequence of SEQ ID NO: 46, and a CDR3 comprising an amino acid sequence of SEQ ID NO: 47;
iii) a CDR1 comprising an amino acid sequence of SEQ ID NO: 49 or SEQ ID NO: 422, a CDR2 comprising an amino acid sequence of SEQ ID NO: 50, and a CDR3 comprising an amino acid sequence of SEQ ID NO: 51;
iv) a CDR1 comprising an amino acid sequence of SEQ ID NO: 53 or SEQ ID NO: 423, a CDR2 comprising an amino acid sequence of SEQ ID NO: 54, and a CDR3 comprising an amino acid sequence of SEQ ID NO: 55;
v) a CDR1 comprising an amino acid sequence of SEQ ID NO: 57 or SEQ ID NO: 424, a CDR2 comprising an amino acid sequence of SEQ ID NO: 58, and a CDR3 comprising an amino acid sequence of SEQ ID NO: 59;
vi) a CDR1 comprising an amino acid sequence of SEQ ID NO: 61 or SEQ ID NO: 425, a CDR2 comprising an amino acid sequence of SEQ ID NO: 62, and a CDR3 comprising an amino acid sequence of SEQ ID NO: 63;
wherein each CDR independently comprises 0, 1, 2, or 3 amino acid changes relative to the sequence.

4. The IL2R binding protein of claim 1, wherein the anti-IL2Rβ VHH antibody comprises a complementarity determining region 1 (CDR1) comprising an amino acid sequence of SEQ ID NO: 9 or SEQ ID NO: 412, a CDR2 comprising an amino acid sequence of SEQ ID NO: 10, and a CDR3 comprising an amino acid sequence of SEQ ID NO: 11; and wherein the anti-IL2Rγ VHH antibody comprises:
i) a CDR1 comprising an amino acid sequence of SEQ ID NO: 41 or SEQ ID NO: 420, a CDR2 comprising an amino acid sequence of SEQ ID NO: 42, and a CDR3 comprising an amino acid sequence of SEQ ID NO: 43;
ii) a CDR1 comprising an amino acid sequence of SEQ ID NO: 45 or SEQ ID NO: 421, a CDR2 comprising an amino acid sequence of SEQ ID NO: 46, and a CDR3 comprising an amino acid sequence of SEQ ID NO: 47;
iii) a CDR1 comprising an amino acid sequence of SEQ ID NO: 49 or SEQ ID NO: 422, a CDR2 comprising an amino acid sequence of SEQ ID NO: 50, and a CDR3 comprising an amino acid sequence of SEQ ID NO: 51;
iv) a CDR1 comprising an amino acid sequence of SEQ ID NO: 53 or SEQ ID NO: 423, a CDR2 comprising an amino acid sequence of SEQ ID NO: 54, and a CDR3 comprising an amino acid sequence of SEQ ID NO: 55;
v) a CDR1 comprising an amino acid sequence of SEQ ID NO: 57 or SEQ ID NO: 424, a CDR2 comprising an amino acid sequence of SEQ ID NO: 58, and a CDR3 comprising an amino acid sequence of SEQ ID NO: 59;
vi) a CDR1 comprising an amino acid sequence of SEQ ID NO: 61 or SEQ ID NO: 425, a CDR2 comprising an amino acid sequence of SEQ ID NO: 62, and a CDR3 comprising an amino acid sequence of SEQ ID NO: 63;
wherein each CDR independently comprises 0, 1, 2, or 3 amino acid changes relative to the sequence.

5. The IL2R binding protein of claim 1, wherein the anti-IL2Rβ VHH antibody comprises a complementarity determining region 1 (CDR1) comprising an amino acid sequence of SEQ ID NO: 13 or SEQ ID NO: 413, a CDR2 comprising an amino acid sequence of SEQ ID NO: 14, and a CDR3 comprising an amino acid sequence of SEQ ID NO: 15; and wherein the anti-IL2Rγ VHH antibody comprises:
i) a CDR1 comprising an amino acid sequence of SEQ ID NO: 41 or SEQ ID NO: 420, a CDR2 comprising an amino acid sequence of SEQ ID NO: 42, and a CDR3 comprising an amino acid sequence of SEQ ID NO: 43;
ii) a CDR1 comprising an amino acid sequence of SEQ ID NO: 45 or SEQ ID NO: 421, a CDR2 comprising an amino acid sequence of SEQ ID NO: 46, and a CDR3 comprising an amino acid sequence of SEQ ID NO: 47;
iii) a CDR1 comprising an amino acid sequence of SEQ ID NO: 49 or SEQ ID NO: 422, a CDR2 comprising an amino acid sequence of SEQ ID NO: 50, and a CDR3 comprising an amino acid sequence of SEQ ID NO: 51;
iv) a CDR1 comprising an amino acid sequence of SEQ ID NO: 53 or SEQ ID NO: 423, a CDR2 comprising an amino acid sequence of SEQ ID NO: 54, and a CDR3 comprising an amino acid sequence of SEQ ID NO: 55;
v) a CDR1 comprising an amino acid sequence of SEQ ID NO: 57 or SEQ ID NO: 424, a CDR2 comprising an amino acid sequence of SEQ ID NO: 58, and a CDR3 comprising an amino acid sequence of SEQ ID NO: 59;
vi) a CDR1 comprising an amino acid sequence of SEQ ID NO: 61 or SEQ ID NO: 425, a CDR2 comprising an amino acid sequence of SEQ ID NO: 62, and a CDR3 comprising an amino acid sequence of SEQ ID NO: 63;
wherein each CDR independently comprises 0, 1, 2, or 3 amino acid changes relative to the sequence.

6. The IL2R binding protein of claim 1, wherein the anti-IL2Rβ VHH antibody comprises a complementarity determining region 1 (CDR1) comprising an amino acid sequence of SEQ ID NO: 17 or SEQ ID NO: 414, a CDR2 comprising an amino acid sequence of SEQ ID NO: 18, and a CDR3 comprising an amino acid sequence of SEQ ID NO: 19; and wherein the anti-IL2Rγ VHH antibody comprises:
i) a CDR1 comprising an amino acid sequence of SEQ ID NO: 41 or SEQ ID NO: 420, a CDR2 comprising an amino acid sequence of SEQ ID NO: 42, and a CDR3 comprising an amino acid sequence of SEQ ID NO: 43;
ii) a CDR1 comprising an amino acid sequence of SEQ ID NO: 45 or SEQ ID NO: 421, a CDR2 comprising an amino acid sequence of SEQ ID NO: 46, and a CDR3 comprising an amino acid sequence of SEQ ID NO: 47;
iii) a CDR1 comprising an amino acid sequence of SEQ ID NO: 49 or SEQ ID NO: 422, a CDR2 comprising an amino acid sequence of SEQ ID NO: 50, and a CDR3 comprising an amino acid sequence of SEQ ID NO: 51;
iv) a CDR1 comprising an amino acid sequence of SEQ ID NO: 53 or SEQ ID NO: 423, a CDR2 comprising an amino acid sequence of SEQ ID NO: 54, and a CDR3 comprising an amino acid sequence of SEQ ID NO: 55;
v) a CDR1 comprising an amino acid sequence of SEQ ID NO: 57 or SEQ ID NO: 424, a CDR2 comprising an amino acid sequence of SEQ ID NO: 58, and a CDR3 comprising an amino acid sequence of SEQ ID NO: 59;
vi) a CDR1 comprising an amino acid sequence of SEQ ID NO: 61 or SEQ ID NO: 425, a CDR2 comprising an amino acid sequence of SEQ ID NO: 62, and a CDR3 comprising an amino acid sequence of SEQ ID NO: 63;
wherein each CDR independently comprises 0, 1, 2, or 3 amino acid changes relative to the sequence.

7. The IL2R binding protein of claim 1, wherein the anti-IL2Rβ VHH antibody comprises a complementarity determining region 1 (CDR1) comprising an amino acid sequence of SEQ ID NO: 21 or SEQ ID NO: 415, a CDR2 comprising an amino acid sequence of SEQ ID NO: 122, and a CDR3 comprising an amino acid sequence of SEQ ID NO: 23; and wherein the anti-IL2Rγ VHH antibody comprises:
i) a CDR1 comprising an amino acid sequence of SEQ ID NO: 41 or SEQ ID NO: 420, a CDR2 comprising an amino acid sequence of SEQ ID NO: 42, and a CDR3 comprising an amino acid sequence of SEQ ID NO: 43;
ii) a CDR1 comprising an amino acid sequence of SEQ ID NO: 45 or SEQ ID NO: 421, a CDR2 comprising an amino acid sequence of SEQ ID NO: 46, and a CDR3 comprising an amino acid sequence of SEQ ID NO: 47;
iii) a CDR1 comprising an amino acid sequence of SEQ ID NO: 49 or SEQ ID NO: 422, a CDR2 comprising an amino acid sequence of SEQ ID NO: 50, and a CDR3 comprising an amino acid sequence of SEQ ID NO: 51;
iv) a CDR1 comprising an amino acid sequence of SEQ ID NO: 53 or SEQ ID NO: 423, a CDR2 comprising an amino acid sequence of SEQ ID NO: 54, and a CDR3 comprising an amino acid sequence of SEQ ID NO: 55;
v) a CDR1 comprising an amino acid sequence of SEQ ID NO: 57 or SEQ ID NO: 424, a CDR2 comprising an amino acid sequence of SEQ ID NO: 58, and a CDR3 comprising an amino acid sequence of SEQ ID NO: 59;
vi) a CDR1 comprising an amino acid sequence of SEQ ID NO: 61 or SEQ ID NO: 425, a CDR2 comprising an amino acid sequence of SEQ ID NO: 62, and a CDR3 comprising an amino acid sequence of SEQ ID NO: 63;
wherein each CDR independently comprises 0, 1, 2, or 3 amino acid changes relative to the sequence.

8. The IL2R binding protein of claim 1, wherein the anti-IL2Rβ VHH antibody comprises a complementarity determining region 1 (CDR1) comprising an amino acid sequence of SEQ ID NO: 25 or SEQ ID NO: 416, a CDR2 comprising an amino acid sequence of SEQ ID NO: 26, and a CDR3 comprising an amino acid sequence of SEQ ID NO: 27; and wherein the anti-IL2Rγ VHH antibody comprises:
i) a CDR1 comprising an amino acid sequence of SEQ ID NO: 41 or SEQ ID NO: 420, a CDR2 comprising an amino acid sequence of SEQ ID NO: 42, and a CDR3 comprising an amino acid sequence of SEQ ID NO: 43;
ii) a CDR1 comprising an amino acid sequence of SEQ ID NO: 45 or SEQ ID NO: 421, a CDR2 comprising an amino acid sequence of SEQ ID NO: 46, and a CDR3 comprising an amino acid sequence of SEQ ID NO: 47;
iii) a CDR1 comprising an amino acid sequence of SEQ ID NO: 49 or SEQ ID NO: 422, a CDR2 comprising an amino acid sequence of SEQ ID NO: 50, and a CDR3 comprising an amino acid sequence of SEQ ID NO: 51;
iv) a CDR1 comprising an amino acid sequence of SEQ ID NO: 53 or SEQ ID NO: 423, a CDR2 comprising an amino acid sequence of SEQ ID NO: 54, and a CDR3 comprising an amino acid sequence of SEQ ID NO: 55;
v) a CDR1 comprising an amino acid sequence of SEQ ID NO: 57 or SEQ ID NO: 424, a CDR2 comprising an amino acid sequence of SEQ ID NO: 58, and a CDR3 comprising an amino acid sequence of SEQ ID NO: 59;
vi) a CDR1 comprising an amino acid sequence of SEQ ID NO: 61 or SEQ ID NO: 425, a CDR2 comprising an amino acid sequence of SEQ ID NO: 62, and a CDR3 comprising an amino acid sequence of SEQ ID NO: 63;
wherein each CDR independently comprises 0, 1, 2, or 3 amino acid changes relative to the sequence.

9. The IL2R binding protein of claim 1, wherein the anti-IL2Rβ VHH antibody comprises a complementarity determining region 1 (CDR1) comprising an amino acid sequence of SEQ ID NO: 29 or SEQ ID NO: 417, a CDR2 comprising an amino acid sequence of SEQ ID NO: 30, and a CDR3 comprising an amino acid sequence of SEQ ID NO: 31; and wherein the anti-IL2Rγ VHH antibody comprises:
i) a CDR1 comprising an amino acid sequence of SEQ ID NO: 41 or SEQ ID NO: 420, a CDR2 comprising an amino acid sequence of SEQ ID NO: 42, and a CDR3 comprising an amino acid sequence of SEQ ID NO: 43;
ii) a CDR1 comprising an amino acid sequence of SEQ ID NO: 45 or SEQ ID NO: 421, a CDR2 comprising an amino acid sequence of SEQ ID NO: 46, and a CDR3 comprising an amino acid sequence of SEQ ID NO: 47;
iii) a CDR1 comprising an amino acid sequence of SEQ ID NO: 49 or SEQ ID NO: 422, a CDR2 comprising an amino acid sequence of SEQ ID NO: 50, and a CDR3 comprising an amino acid sequence of SEQ ID NO: 51;
iv) a CDR1 comprising an amino acid sequence of SEQ ID NO: 53 or SEQ ID NO: 423, a CDR2 comprising an amino acid sequence of SEQ ID NO: 54, and a CDR3 comprising an amino acid sequence of SEQ ID NO: 55;
v) a CDR1 comprising an amino acid sequence of SEQ ID NO: 57 or SEQ ID NO: 424, a CDR2 comprising an amino acid sequence of SEQ ID NO: 58, and a CDR3 comprising an amino acid sequence of SEQ ID NO: 59;
vi) a CDR1 comprising an amino acid sequence of SEQ ID NO: 61 or SEQ ID NO: 425, a CDR2 comprising an amino acid sequence of SEQ ID NO: 62, and a CDR3 comprising an amino acid sequence of SEQ ID NO: 63;
wherein each CDR independently comprises 0, 1, 2, or 3 amino acid changes relative to the sequence.

10. The IL2R binding protein of claim 1, wherein the anti-IL2Rβ VHH antibody comprises a complementarity determining region 1 (CDR1) comprising an amino acid sequence of SEQ ID NO: 33 or SEQ ID NO: 418, a CDR2 comprising an amino acid sequence of SEQ ID NO: 34, and a CDR3 comprising an amino acid sequence of SEQ ID NO: 35; and wherein the anti-IL2Rγ VHH antibody comprises:
i) a CDR1 comprising an amino acid sequence of SEQ ID NO: 41 or SEQ ID NO: 420, a CDR2 comprising an amino acid sequence of SEQ ID NO: 42, and a CDR3 comprising an amino acid sequence of SEQ ID NO: 43;
ii) a CDR1 comprising an amino acid sequence of SEQ ID NO: 45 or SEQ ID NO: 421, a CDR2 comprising an amino acid sequence of SEQ ID NO: 46, and a CDR3 comprising an amino acid sequence of SEQ ID NO: 47;
iii) a CDR1 comprising an amino acid sequence of SEQ ID NO: 49 or SEQ ID NO: 422, a CDR2 comprising an amino acid sequence of SEQ ID NO: 50, and a CDR3 comprising an amino acid sequence of SEQ ID NO: 51;
iv) a CDR1 comprising an amino acid sequence of SEQ ID NO: 53 or SEQ ID NO: 423, a CDR2 comprising an amino acid sequence of SEQ ID NO: 54, and a CDR3 comprising an amino acid sequence of SEQ ID NO: 55;
v) a CDR1 comprising an amino acid sequence of SEQ ID NO: 57 or SEQ ID NO: 424, a CDR2 comprising an amino acid sequence of SEQ ID NO: 58, and a CDR3 comprising an amino acid sequence of SEQ ID NO: 59;
vi) a CDR1 comprising an amino acid sequence of SEQ ID NO: 61 or SEQ ID NO: 425, a CDR2 comprising an amino acid sequence of SEQ ID NO: 62, and a CDR3 comprising an amino acid sequence of SEQ ID NO: 63;
wherein each CDR independently comprises 0, 1, 2, or 3 amino acid changes relative to the sequence.

11. The IL2R binding protein of claim 1, wherein the anti-IL2Rβ VHH antibody comprises a complementarity determining region 1 (CDR1) comprising an amino acid sequence of SEQ ID NO: 37 or SEQ ID NO: 419, a CDR2 comprising an amino acid sequence of SEQ ID NO: 38, and a CDR3 comprising an amino acid sequence of SEQ ID NO: 39; and wherein the anti-IL2Rγ VHH antibody comprises:
i) a CDR1 comprising an amino acid sequence of SEQ ID NO: 41 or SEQ ID NO: 420, a CDR2 comprising an amino acid sequence of SEQ ID NO: 42, and a CDR3 comprising an amino acid sequence of SEQ ID NO: 43;
ii) a CDR1 comprising an amino acid sequence of SEQ ID NO: 45 or SEQ ID NO: 421, a CDR2 comprising an amino acid sequence of SEQ ID NO: 46, and a CDR3 comprising an amino acid sequence of SEQ ID NO: 47;
iii) a CDR1 comprising an amino acid sequence of SEQ ID NO: 49 or SEQ ID NO: 422, a CDR2 comprising an amino acid sequence of SEQ ID NO: 50, and a CDR3 comprising an amino acid sequence of SEQ ID NO: 51;
iv) a CDR1 comprising an amino acid sequence of SEQ ID NO: 53 or SEQ ID NO: 423, a CDR2 comprising an amino acid sequence of SEQ ID NO: 54, and a CDR3 comprising an amino acid sequence of SEQ ID NO: 55;
v) a CDR1 comprising an amino acid sequence of SEQ ID NO: 57 or SEQ ID NO: 424, a CDR2 comprising an amino acid sequence of SEQ ID NO: 58, and a CDR3 comprising an amino acid sequence of SEQ ID NO: 59;
vi) a CDR1 comprising an amino acid sequence of SEQ ID NO: 61 or SEQ ID NO: 425, a CDR2 comprising an amino acid sequence of SEQ ID NO: 62, and a CDR3 comprising an amino acid sequence of SEQ ID NO: 63;
wherein each CDR independently comprises 0, 1, 2, or 3 amino acid changes relative to the sequence.

12. (canceled)

13. (canceled)

14. The IL2R binding protein of claim 1, wherein the anti-IL2Rβ VHH antibody comprises a sequence having at least 90% identity to a sequence of any one of DR214 (SEQ ID NO: 4), DR217 (SEQ ID NO: 8), DR583 (SEQ ID NO: 12), DR584 (SEQ ID NO: 16), DR585 (SEQ ID NO: 20), DR586 (SEQ ID NO: 24), DR587 (SEQ ID NO: 28), DR588 (SEQ ID NO: 32), DR589 (SEQ ID NO: 36), and DR590 (SEQ ID NO: 40).

15. (canceled)

16. (canceled)

17. The IL2R binding protein of claim 1, wherein the anti-IL2Rγ VHH antibody comprises a sequence having at least 90% identity to a sequence of any one of DR229 (SEQ ID NO: 44), DR230 (SEQ ID NO: 48), DR231 (SEQ ID NO: 52), DR232 (SEQ ID NO: 56), DR233 (SEQ ID NO: 60), and DR234 (SEQ ID NO: 64).

18. The IL2R binding protein of claim 1, wherein the anti-IL2Rβ VHH antibody is at the N-terminus and the anti-IL2Rγ VHH antibody is at the C-terminus.

19. The IL2R binding protein of claim 18, wherein the binding protein comprises a sequence having at least 90% identity to a sequence of any one of SEQ ID NOS: 65-80.

20. The IL2R binding protein of claim 1, wherein the anti-IL2Rγ VHH antibody is at the N-terminus and the anti-IL2Rβ VHH antibody is at the C-terminus.

21. The IL2R binding protein of claim 20, wherein the binding protein comprises a sequence having at least 90% identity to a sequence of any one of SEQ ID NOS: 81-106.

22. The IL2R binding protein of claim 1, wherein the anti-IL2Rβ VHH antibody and the anti-IL2Rγ VHH antibody are joined by a peptide linker.

23. (canceled)

24. The IL2R binding protein of claim 1, wherein the binding protein comprises a sequence with at least 90% (e.g., 96%, identity to a sequence of any one of SEQ ID NOS: 65-80, SEQ ID NOS: 81-106, or SEQ ID NOS: 170-28.

25. The IL2R binding protein of claim 1, wherein the binding protein is conjugated to an Fc polypeptide or an Fc domain.

26. (canceled)

27. The IL2R binding protein of claim 1, wherein the binding protein is PEGylated.

28. (canceled)

29. A heterodimeric IL2Rβ binding protein/IL2Rγ binding protein pair, the heterodimeric IL2Rβ binding protein/IL2Rβ binding protein pair comprising a first polypeptide of the formula #1: [chemical structure]
and a second polypeptide of the formula #2: [chemical structure]
wherein:
L1 and L2 are GSA linkers and a and b are independently selected from 0 (absent) or 1 (present);
UH1 and UH2 are each an upper hinge domain of human immunoglobulin independently selected from the group consisting of the IgG1, IgG2, IgG3 and IgG4 upper hinge;
Fc1 is a polypeptide comprising the lower hinge, CH2 and CH3 domains of a human immunoglobulin selected from the group consisting of IgG1, IgG2, IgG3 and IgG4, comprising one or more amino acid substitutions promote heterodimerization with Fc2, and
Fc2 is a polypeptide comprising the lower hinge, CH2 and CH3 domains of a human immunoglobulin selected from the group consisting of IgG1, IgG2, IgG3 and IgG4, comprising one or more amino acid substitutions promote heterodimerization with Fc1, and
wherein the polypeptide of formula 1 and the polypeptide of formula 2 are linked by at least one interchain disulfide bond, and wherein
(A) the anti-IL2Rβ VHH antibody comprises a complementarity determining region 1 (CDR1) comprising an amino acid sequence of SEQ ID NO: 1 or SEQ ID NO: 410, a CDR2 comprising an amino acid sequence of SEQ ID NO: 2, and a CDR3 comprising an amino acid sequence of SEQ ID NO: 3; and wherein the anti-IL2Rγ VHH antibody comprises:
i) a CDR1 comprising an amino acid sequence of SEQ ID NO: 41 or SEQ ID NO: 420, a CDR2 comprising an amino acid sequence of SEQ ID NO: 42, and a CDR3 comprising an amino acid sequence of SEQ ID NO: 43;
ii) a CDR1 comprising an amino acid sequence of SEQ ID NO: 45 or SEQ ID NO: 421, a CDR2 comprising an amino acid sequence of SEQ ID NO: 46, and a CDR3 comprising an amino acid sequence of SEQ ID NO: 47;
iii) a CDR1 comprising an amino acid sequence of SEQ ID NO: 49 or SEQ ID NO: 422, a CDR2 comprising an amino acid sequence of SEQ ID NO: 50, and a CDR3 comprising an amino acid sequence of SEQ ID NO: 51;
iv) a CDR1 comprising an amino acid sequence of SEQ ID NO: 53 or SEQ ID NO: 423, a CDR2 comprising an amino acid sequence of SEQ ID NO: 54, and a CDR3 comprising an amino acid sequence of SEQ ID NO: 55;
v) a CDR1 comprising an amino acid sequence of SEQ ID NO: 57 or SEQ ID NO: 424, a CDR2 comprising an amino acid sequence of SEQ ID NO: 58, and a CDR3 comprising an amino acid sequence of SEQ ID NO: 59;
vi) a CDR1 comprising an amino acid sequence of SEQ ID NO: 61 or SEQ ID NO: 425, a CDR2 comprising an amino acid sequence of SEQ ID NO: 62, and a CDR3 comprising an amino acid sequence of SEQ ID NO: 63;
(B) the anti-IL2Rβ VHH antibody comprises a complementarity determining region 1 (CDR1) comprising an amino acid sequence of SEQ ID NO: 5 or SEQ ID NO: 411, a CDR2 comprising an amino acid sequence of SEQ ID NO: 6, and a CDR3 comprising an amino acid sequence of SEQ ID NO: 7; and wherein the anti-IL2Rγ VHH antibody comprises:
i) a CDR1 comprising an amino acid sequence of SEQ ID NO: 41 or SEQ ID NO: 420, a CDR2 comprising an amino acid sequence of SEQ ID NO: 42, and a CDR3 comprising an amino acid sequence of SEQ ID NO: 43;
ii) a CDR1 comprising an amino acid sequence of SEQ ID NO: 45 or SEQ ID NO: 421, a CDR2 comprising an amino acid sequence of SEQ ID NO: 46, and a CDR3 comprising an amino acid sequence of SEQ ID NO: 47;
iii) a CDR1 comprising an amino acid sequence of SEQ ID NO: 49 or SEQ ID NO: 422, a CDR2 comprising an amino acid sequence of SEQ ID NO: 50, and a CDR3 comprising an amino acid sequence of SEQ ID NO: 51;
iv) a CDR1 comprising an amino acid sequence of SEQ ID NO: 53 or SEQ ID NO: 423, a CDR2 comprising an amino acid sequence of SEQ ID NO: 54, and a CDR3 comprising an amino acid sequence of SEQ ID NO: 55;
v) a CDR1 comprising an amino acid sequence of SEQ ID NO: 57 or SEQ ID NO: 424, a CDR2 comprising an amino acid sequence of SEQ ID NO: 58, and a CDR3 comprising an amino acid sequence of SEQ ID NO: 59;
vi) a CDR1 comprising an amino acid sequence of SEQ ID NO: 61 or SEQ ID NO: 425, a CDR2 comprising an amino acid sequence of SEQ ID NO: 62, and a CDR3 comprising an amino acid sequence of SEQ ID NO: 63;
(C) the anti-IL2Rβ VHH antibody comprises a complementarity determining region 1 (CDR1) comprising an amino acid sequence of SEQ ID NO: 9 or SEQ ID NO: 412, a CDR2 comprising an amino acid sequence of SEQ ID NO: 10, and a CDR3 comprising an amino acid sequence of SEQ ID NO: 11; and wherein the anti-IL2Rγ VHH antibody comprises:
i) a CDR1 comprising an amino acid sequence of SEQ ID NO: 41 or SEQ ID NO: 420, a CDR2 comprising an amino acid sequence of SEQ ID NO: 42, and a CDR3 comprising an amino acid sequence of SEQ ID NO: 43;
ii) a CDR1 comprising an amino acid sequence of SEQ ID NO: 45 or SEQ ID NO: 421, a CDR2 comprising an amino acid sequence of SEQ ID NO: 46, and a CDR3 comprising an amino acid sequence of SEQ ID NO: 47;
iii) a CDR1 comprising an amino acid sequence of SEQ ID NO: 49 or SEQ ID NO: 422, a CDR2 comprising an amino acid sequence of SEQ ID NO: 50, and a CDR3 comprising an amino acid sequence of SEQ ID NO: 51;
iv) a CDR1 comprising an amino acid sequence of SEQ ID NO: 53 or SEQ ID NO: 423, a CDR2 comprising an amino acid sequence of SEQ ID NO: 54, and a CDR3 comprising an amino acid sequence of SEQ ID NO: 55;
v) a CDR1 comprising an amino acid sequence of SEQ ID NO: 57 or SEQ ID NO: 424, a CDR2 comprising an amino acid sequence of SEQ ID NO: 58, and a CDR3 comprising an amino acid sequence of SEQ ID NO: 59;
vi) a CDR1 comprising an amino acid sequence of SEQ ID NO: 61 or SEQ ID NO: 425, a CDR2 comprising an amino acid sequence of SEQ ID NO: 62, and a CDR3 comprising an amino acid sequence of SEQ ID NO: 63;
(D) the anti-IL2Rβ VHH antibody comprises a complementarity determining region 1 (CDR1) comprising an amino acid sequence of SEQ ID NO: 13 or SEQ ID NO: 413, a CDR2 comprising an amino acid sequence of SEQ ID NO: 14, and a CDR3 comprising an amino acid sequence of SEQ ID NO: 15; and wherein the anti-IL2Rγ VHH antibody comprises:
i) a CDR1 comprising an amino acid sequence of SEQ ID NO: 41 or SEQ ID NO: 420, a CDR2 comprising an amino acid sequence of SEQ ID NO: 42, and a CDR3 comprising an amino acid sequence of SEQ ID NO: 43;
ii) a CDR1 comprising an amino acid sequence of SEQ ID NO: 45 or SEQ ID NO: 421, a CDR2 comprising an amino acid sequence of SEQ ID NO: 46, and a CDR3 comprising an amino acid sequence of SEQ ID NO: 47;
iii) a CDR1 comprising an amino acid sequence of SEQ ID NO: 49 or SEQ ID NO: 422, a CDR2 comprising an amino acid sequence of SEQ ID NO: 50, and a CDR3 comprising an amino acid sequence of SEQ ID NO: 51;
iv) a CDR1 comprising an amino acid sequence of SEQ ID NO: 53 or SEQ ID NO: 423, a CDR2 comprising an amino acid sequence of SEQ ID NO: 54, and a CDR3 comprising an amino acid sequence of SEQ ID NO: 55;
v) a CDR1 comprising an amino acid sequence of SEQ ID NO: 57 or SEQ ID NO: 424, a CDR2 comprising an amino acid sequence of SEQ ID NO: 58, and a CDR3 comprising an amino acid sequence of SEQ ID NO: 59;
vi) a CDR1 comprising an amino acid sequence of SEQ ID NO: 61 or SEQ ID NO: 425, a CDR2 comprising an amino acid sequence of SEQ ID NO: 62, and a CDR3 comprising an amino acid sequence of SEQ ID NO: 63;
(E) the anti-IL2Rβ VHH antibody comprises a complementarity determining region 1 (CDR1) comprising an amino acid sequence of SEQ ID NO: 17 or SEQ ID NO: 414, a CDR2 comprising an amino acid sequence of SEQ ID NO: 18, and a CDR3 comprising an amino acid sequence of SEQ ID NO: 19; and wherein the anti-IL2Rγ VHH antibody comprises:
i) a CDR1 comprising an amino acid sequence of SEQ ID NO: 41 or SEQ ID NO: 420, a CDR2 comprising an amino acid sequence of SEQ ID NO: 42, and a CDR3 comprising an amino acid sequence of SEQ ID NO: 43;
ii) a CDR1 comprising an amino acid sequence of SEQ ID NO: 45 or SEQ ID NO: 421, a CDR2 comprising an amino acid sequence of SEQ ID NO: 46, and a CDR3 comprising an amino acid sequence of SEQ ID NO: 47;
iii) a CDR1 comprising an amino acid sequence of SEQ ID NO: 49 or SEQ ID NO: 422, a CDR2 comprising an amino acid sequence of SEQ ID NO: 50, and a CDR3 comprising an amino acid sequence of SEQ ID NO: 51;
iv) a CDR1 comprising an amino acid sequence of SEQ ID NO: 53 or SEQ ID NO: 423, a CDR2 comprising an amino acid sequence of SEQ ID NO: 54, and a CDR3 comprising an amino acid sequence of SEQ ID NO: 55;
v) a CDR1 comprising an amino acid sequence of SEQ ID NO: 57 or SEQ ID NO: 424, a CDR2 comprising an amino acid sequence of SEQ ID NO: 58, and a CDR3 comprising an amino acid sequence of SEQ ID NO: 59;
vi) a CDR1 comprising an amino acid sequence of SEQ ID NO: 61 or SEQ ID NO: 425, a CDR2 comprising an amino acid sequence of SEQ ID NO: 62, and a CDR3 comprising an amino acid sequence of SEQ ID NO: 63;
(F) the anti-IL2Rβ VHH antibody comprises a complementarity determining region 1 (CDR1) comprising an amino acid sequence of SEQ ID NO: 21 or SEQ ID NO: 415, a CDR2 comprising an amino acid sequence of SEQ ID NO: 122, and a CDR3 comprising an amino acid sequence of SEQ ID NO: 23; and wherein the anti-IL2Rγ VHH antibody comprises:
i) a CDR1 comprising an amino acid sequence of SEQ ID NO: 41 or SEQ ID NO: 420, a CDR2 comprising an amino acid sequence of SEQ ID NO: 42, and a CDR3 comprising an amino acid sequence of SEQ ID NO: 43;
ii) a CDR1 comprising an amino acid sequence of SEQ ID NO: 45 or SEQ ID NO: 421, a CDR2 comprising an amino acid sequence of SEQ ID NO: 46, and a CDR3 comprising an amino acid sequence of SEQ ID NO: 47;
iii) a CDR1 comprising an amino acid sequence of SEQ ID NO: 49 or SEQ ID NO: 422, a CDR2 comprising an amino acid sequence of SEQ ID NO: 50, and a CDR3 comprising an amino acid sequence of SEQ ID NO: 51;
iv) a CDR1 comprising an amino acid sequence of SEQ ID NO: 53 or SEQ ID NO: 423, a CDR2 comprising an amino acid sequence of SEQ ID NO: 54, and a CDR3 comprising an amino acid sequence of SEQ ID NO: 55;
v) a CDR1 comprising an amino acid sequence of SEQ ID NO: 57 or SEQ ID NO: 424, a CDR2 comprising an amino acid sequence of SEQ ID NO: 58, and a CDR3 comprising an amino acid sequence of SEQ ID NO: 59;
vi) a CDR1 comprising an amino acid sequence of SEQ ID NO: 61 or SEQ ID NO: 425, a CDR2 comprising an amino acid sequence of SEQ ID NO: 62, and a CDR3 comprising an amino acid sequence of SEQ ID NO: 63;
(G) the anti-IL2Rβ VHH antibody comprises a complementarity determining region 1 (CDR1) comprising an amino acid sequence of SEQ ID NO: 25 or SEQ ID NO: 416, a CDR2 comprising an amino acid sequence of SEQ ID NO: 26, and a CDR3 comprising an amino acid sequence of SEQ ID NO: 27; and wherein the anti-IL2Rγ VHH antibody comprises:
i) a CDR1 comprising an amino acid sequence of SEQ ID NO: 41 or SEQ ID NO: 420, a CDR2 comprising an amino acid sequence of SEQ ID NO: 42, and a CDR3 comprising an amino acid sequence of SEQ ID NO: 43;
ii) a CDR1 comprising an amino acid sequence of SEQ ID NO: 45 or SEQ ID NO: 421, a CDR2 comprising an amino acid sequence of SEQ ID NO: 46, and a CDR3 comprising an amino acid sequence of SEQ ID NO: 47;
iii) a CDR1 comprising an amino acid sequence of SEQ ID NO: 49 or SEQ ID NO: 422, a CDR2 comprising an amino acid sequence of SEQ ID NO: 50, and a CDR3 comprising an amino acid sequence of SEQ ID NO: 51;
iv) a CDR1 comprising an amino acid sequence of SEQ ID NO: 53 or SEQ ID NO: 423, a CDR2 comprising an amino acid sequence of SEQ ID NO: 54, and a CDR3 comprising an amino acid sequence of SEQ ID NO: 55;
v) a CDR1 comprising an amino acid sequence of SEQ ID NO: 57 or SEQ ID NO: 424, a CDR2 comprising an amino acid sequence of SEQ ID NO: 58, and a CDR3 comprising an amino acid sequence of SEQ ID NO: 59;
vi) a CDR1 comprising an amino acid sequence of SEQ ID NO: 61 or SEQ ID NO: 425, a CDR2 comprising an amino acid sequence of SEQ ID NO: 62, and a CDR3 comprising an amino acid sequence of SEQ ID NO: 63;
(H) the anti-IL2Rβ VHH antibody comprises a complementarity determining region 1 (CDR1) comprising an amino acid sequence of SEQ ID NO: 29 or SEQ ID NO: 417, a CDR2 comprising an amino acid sequence of SEQ ID NO: 30, and a CDR3 comprising an amino acid sequence of SEQ ID NO: 31; and wherein the anti-IL2Rγ VHH antibody comprises:
i) a CDR1 comprising an amino acid sequence of SEQ ID NO: 41 or SEQ ID NO: 420, a CDR2 comprising an amino acid sequence of SEQ ID NO: 42, and a CDR3 comprising an amino acid sequence of SEQ ID NO: 43;
ii) a CDR1 comprising an amino acid sequence of SEQ ID NO: 45 or SEQ ID NO: 421, a CDR2 comprising an amino acid sequence of SEQ ID NO: 46, and a CDR3 comprising an amino acid sequence of SEQ ID NO: 47;
iii) a CDR1 comprising an amino acid sequence of SEQ ID NO: 49 or SEQ ID NO: 422, a CDR2 comprising an amino acid sequence of SEQ ID NO: 50, and a CDR3 comprising an amino acid sequence of SEQ ID NO: 51;
iv) a CDR1 comprising an amino acid sequence of SEQ ID NO: 53 or SEQ ID NO: 423, a CDR2 comprising an amino acid sequence of SEQ ID NO: 54, and a CDR3 comprising an amino acid sequence of SEQ ID NO: 55;
v) a CDR1 comprising an amino acid sequence of SEQ ID NO: 57 or SEQ ID NO: 424, a CDR2 comprising an amino acid sequence of SEQ ID NO: 58, and a CDR3 comprising an amino acid sequence of SEQ ID NO: 59;
vi) a CDR1 comprising an amino acid sequence of SEQ ID NO: 61 or SEQ ID NO: 425, a CDR2 comprising an amino acid sequence of SEQ ID NO: 62, and a CDR3 comprising an amino acid sequence of SEQ ID NO: 63;
(I) the anti-IL2Rβ VHH antibody comprises a complementarity determining region 1 (CDR1) comprising an amino acid sequence of SEQ ID NO: 33 or SEQ ID NO: 418, a CDR2 comprising an amino acid sequence of SEQ ID NO: 34, and a CDR3 comprising an amino acid sequence of SEQ ID NO: 35; and wherein the anti-IL2Rγ VHH antibody comprises:
i) a CDR1 comprising an amino acid sequence of SEQ ID NO: 41 or SEQ ID NO: 420, a CDR2 comprising an amino acid sequence of SEQ ID NO: 42, and a CDR3 comprising an amino acid sequence of SEQ ID NO: 43;
ii) a CDR1 comprising an amino acid sequence of SEQ ID NO: 45 or SEQ ID NO: 421, a CDR2 comprising an amino acid sequence of SEQ ID NO: 46, and a CDR3 comprising an amino acid sequence of SEQ ID NO: 47;
iii) a CDR1 comprising an amino acid sequence of SEQ ID NO: 49 or SEQ ID NO: 422, a CDR2 comprising an amino acid sequence of SEQ ID NO: 50, and a CDR3 comprising an amino acid sequence of SEQ ID NO: 51;
iv) a CDR1 comprising an amino acid sequence of SEQ ID NO: 53 or SEQ ID NO: 423, a CDR2 comprising an amino acid sequence of SEQ ID NO: 54, and a CDR3 comprising an amino acid sequence of SEQ ID NO: 55;
v) a CDR1 comprising an amino acid sequence of SEQ ID NO: 57 or SEQ ID NO: 424, a CDR2 comprising an amino acid sequence of SEQ ID NO: 58, and a CDR3 comprising an amino acid sequence of SEQ ID NO: 59;
vi) a CDR1 comprising an amino acid sequence of SEQ ID NO: 61 or SEQ ID NO: 425, a CDR2 comprising an amino acid sequence of SEQ ID NO: 62, and a CDR3 comprising an amino acid sequence of SEQ ID NO: 63; or
(J) the anti-IL2Rβ VHH antibody comprises a complementarity determining region 1 (CDR1) comprising an amino acid sequence of SEQ ID NO: 37 or SEQ ID NO: 419, a CDR2 comprising an amino acid sequence of SEQ ID NO: 38, and a CDR3 comprising an amino acid sequence of SEQ ID NO: 39; and wherein the anti-IL2Rγ VHH antibody comprises:
i) a CDR1 comprising an amino acid sequence of SEQ ID NO: 41 or SEQ ID NO: 420, a CDR2 comprising an amino acid sequence of SEQ ID NO: 42, and a CDR3 comprising an amino acid sequence of SEQ ID NO: 43;
ii) a CDR1 comprising an amino acid sequence of SEQ ID NO: 45 or SEQ ID NO: 421, a CDR2 comprising an amino acid sequence of SEQ ID NO: 46, and a CDR3 comprising an amino acid sequence of SEQ ID NO: 47;
iii) a CDR1 comprising an amino acid sequence of SEQ ID NO: 49 or SEQ ID NO: 422, a CDR2 comprising an amino acid sequence of SEQ ID NO: 50, and a CDR3 comprising an amino acid sequence of SEQ ID NO: 51;
iv) a CDR1 comprising an amino acid sequence of SEQ ID NO: 53 or SEQ ID NO: 423, a CDR2 comprising an amino acid sequence of SEQ ID NO: 54, and a CDR3 comprising an amino acid sequence of SEQ ID NO: 55;
v) a CDR1 comprising an amino acid sequence of SEQ ID NO: 57 or SEQ ID NO: 424, a CDR2 comprising an amino acid sequence of SEQ ID NO: 58, and a CDR3 comprising an amino acid sequence of SEQ ID NO: 59;
vi) a CDR1 comprising an amino acid sequence of SEQ ID NO: 61 or SEQ ID NO: 425, a CDR2 comprising an amino acid sequence of SEQ ID NO: 62, and a CDR3 comprising an amino acid sequence of SEQ ID NO: 63;
wherein each CDR independently comprises 0, 1, 2, or 3 amino acid changes relative to the sequence, or
the anti-IL2Rβ VHH antibody comprises:
a CDR1 having at least 90% sequence identity, or having 0, 1, 2, or 3 amino acid changes, relative to the sequence of any CDR1 in a row of Table 30 or Table 31;
a CDR2 having at least 90% sequence identity, or having 0, 1, 2, or 3 amino acid changes, relative to the sequence of any CDR2 in a row of Table 30 or Table 31; and
a CDR3 having at least 90% sequence identity, or having 0, 1, 2, or 3 amino acid changes, relative to the sequence of any CDR3 listed in Table 30 or Table 31; and
the anti-IL2Rγ VHH antibody comprises:
a CDR1 having at least 90% sequence identity, or having 0, 1, 2, or 3 amino acid changes, relative to the sequence of any CDR1 listed in Table 32 or Table 33;
a CDR2 having at least 90% sequence identity, or having 0, 1, 2, or 3 amino acid changes, relative to the sequence of any CDR2 listed in Table 32 or Table 33; and
a CDR3 having at least 90% sequence identity, or having 0, 1, 2, or 3 amino acid changes, relative to the sequence of any CDR3 listed in Table 32 or Table 33.

30. An isolated nucleic acid encoding the IL2R binding protein of claim 1.

31. An expression vector comprising the nucleic acid of claim 30.

32. An isolated host cell comprising the vector of claim 31.

33. A pharmaceutical composition comprising the IL2R binding protein of claim 1.

34. A method of treating a neoplastic disease in a subject in need thereof, comprising administering to the subject a therapeutically effective amount of an IL2R binding protein of claim 1.

35-38. (canceled)

39. A method of treating an autoimmune or inflammatory disease, disorder, or condition or a viral infection in a subject in need thereof, comprising administering to the subject a therapeutically effective amount of an IL2R binding protein of claim 1.

40-42. (canceled)

43. A method to selectively induce proliferation of a first cell type over a second cell type, comprising contacting a population of cells comprising both the first and second cell types with an 112 binding protein of claim 1, thereby selectively inducing proliferation in one or more of the first cell type over one or more of the second cell type.

44-46. (canceled)

The application's sequence listing, which the Patent Office published only in electronic form, follows.

SEQUENCE LISTING (809 sequences)

SEQ ID NO: 1 - protein, 5 aa, Artificial Sequence
  Description of Artificial Sequence: Synthetic peptide
TQDMS

SEQ ID NO: 2 - protein, 17 aa, Artificial Sequence
  Description of Artificial Sequence: Synthetic peptide
SILTPNGSTYYADSVKG

SEQ ID NO: 3 - protein, 13 aa, Artificial Sequence
  Description of Artificial Sequence: Synthetic peptide
VDERCEAEDQIDY

SEQ ID NO: 4 - protein, 122 aa, Artificial Sequence
  Description of Artificial Sequence: Synthetic polypeptide
QVQLLESGGGLVQPGGSLRLSCAASGVRISTQDMSWVRQAPGKGLEWVSSILTPNGSTYYADSVKGRFTISRDNSKNTLYLQMNSLRAEDTAVYYCAGVDERCEAEDQIDYWGQGTLVTVSS

SEQ ID NO: 5 - protein, 5 aa, Artificial Sequence
  Description of Artificial Sequence: Synthetic peptide
SEDMS

SEQ ID NO: 6 - protein, 17 aa, Artificial Sequence
  Description of Artificial Sequence: Synthetic peptide
TIASDDGSTYYADSVKG

SEQ ID NO: 7 - protein, 10 aa, Artificial Sequence
  Description of Artificial Sequence: Synthetic peptide
FDAQDAAIEY

SEQ ID NO: 8 - protein, 119 aa, Artificial Sequence
  Description of Artificial Sequence: Synthetic polypeptide
QVQLLESGGGLVQPGGSLRLSCAASGDMIISEDMSWVRQAPGKGLEWVSTIASDDGSTYYADSVKGRFTISRDNSKNTLYLQMNSLRAEDTAVYYCAGFDAQDAAIEYWGQGTLVTVSS

SEQ ID NO: 9 - protein, 5 aa, Artificial Sequence
  Description of Artificial Sequence: Synthetic peptide
TSDMS

SEQ ID NO: 10 - protein, 16 aa, Artificial Sequence
  Description of Artificial Sequence: Synthetic peptide
DIDSGDWAAYADAVKG

SEQ ID NO: 11 - protein, 11 aa, Artificial Sequence
  Description of Artificial Sequence: Synthetic peptide
SYWKWGKLNNF

SEQ ID NO: 12 - protein, 119 aa, Artificial Sequence
  Description of Artificial Sequence: Synthetic polypeptide
QVQLQESGGGSVQAGGSLRLSCVGSGYTYDTSDMSWYRQAPGKEREFVSDIDSGDWAAYADAVKGRFTISRDNAKKTVYLQMNSLEPEDTAMYYCKASYWKWGKLNNFWGPGTQVTVSS

SEQ ID NO: 13 - protein, 5 aa, Artificial Sequence
  Description of Artificial Sequence: Synthetic peptide
NYGMS

SEQ ID NO: 14 - protein, 17 aa, Artificial Sequence
  Description of Artificial Sequence: Synthetic peptide
YINGDGSRTHYADSVKG

SEQ ID NO: 15 - protein, 13 aa, Artificial Sequence
  Description of Artificial Sequence: Synthetic peptide
GLSRDGWSLSAAS

SEQ ID NO: 16 - protein, 122 aa, Artificial Sequence
  Description of Artificial Sequence: Synthetic polypeptide
QVQLQESGGGLVQPGGSLKLSCAASGFRFSNYGMSWVRQAPGEGLEWVSYINGDGSRTHYADSVKGRFTISRDNAKNTLYLQLNSLKTEDTAMYYCEKGLSRDGWSLSAASRGQGTQVTVSS

SEQ ID NO: 17 - protein, 5 aa, Artificial Sequence
  Description of Artificial Sequence: Synthetic peptide
FNYMG

SEQ ID NO: 18 - protein, 17 aa, Artificial Sequence
  Description of Artificial Sequence: Synthetic peptide
VIYTGGGSTLYADSVKG

SEQ ID NO: 19 - protein, 15 aa, Artificial Sequence
  Description of Artificial Sequence: Synthetic peptide
DDQRFASPLYAYFGY

SEQ ID NO: 20 - protein, 125 aa, Artificial Sequence
  Description of Artificial Sequence: Synthetic polypeptide
QVQLQESGGGSVQTGGSLRLSCAVSGYTTYSFNYMGWFRQAPGKEREGVAVIYTGGGSTLYADSVKGRFTISQDNAKNTVYLQMNSLKPEDTAMYYCAADDQRFASPLYAYFGYWGQGTQVTVSS

SEQ ID NO: 21 - protein, 5 aa, Artificial Sequence
  Description of Artificial Sequence: Synthetic peptide
NYWIF

SEQ ID NO: 22 - protein, 17 aa, Artificial Sequence
  Description of Artificial Sequence: Synthetic peptide
TSNTGGDTTKYADSVKG

SEQ ID NO: 23 - protein, 7 aa, Artificial Sequence
  Description of Artificial Sequence: Synthetic peptide
GRCARSG

SEQ ID NO: 24 - protein, 116 aa, Artificial Sequence
  Description of Artificial Sequence: Synthetic polypeptide
QVQLQESGGGLVQPGGSLRLSCVASGFTFSNYWIFWVRQAAGKGLEWLSTSNTGGDTTKYADSVKGRFTISRDSAKNTEYLQMNSLKPEDTAVYYCETGRCARSGGYQGTQVTVSS

SEQ ID NO: 25 - protein, 5 aa, Artificial Sequence
  Description of Artificial Sequence: Synthetic peptide
IRCMG

SEQ ID NO: 26 - protein, 16 aa, Artificial Sequence
  Description of Artificial Sequence: Synthetic peptide
AIDREGFATYADSVYD

SEQ ID NO: 27 - protein, 16 aa, Artificial Sequence
  Description of Artificial Sequence: Synthetic peptide
QNMCRVVRGAMTGVDY

SEQ ID NO: 28 - protein, 124 aa, Artificial Sequence
  Description of Artificial Sequence: Synthetic polypeptide
QVQLQESGGGSVQVGGSLRLSCATSGDTKSIRCMGWFRQTPGKEREGIAAIDREGFATYADSVYDRFTIAQDNAQNTLYLEMNALKPEDTAMYYCAAQNMCRVVRGAMTGVDYWGKGTQVTVSS

SEQ ID NO: 29 - protein, 6 aa, Artificial Sequence
  Description of Artificial Sequence: Synthetic peptide
SYYCMG

SEQ ID NO: 30 - protein, 16 aa, Artificial Sequence
  Description of Artificial Sequence: Synthetic peptide
AIDSDGSTSYADSVKG

SEQ ID NO: 31 - protein, 16 aa, Artificial Sequence
  Description of Artificial Sequence: Synthetic peptide
SYEVVDCYPSGYGQDY

SEQ ID NO: 32 - protein, 125 aa, Artificial Sequence
  Description of Artificial Sequence: Synthetic polypeptide
QVQLQESGGGSVQVGGSLKLSCAASGYTYSSYYCMGWFRQAPGKEREGVAAIDSDGSTSYADSVKGRFTISQDDAKNTLYLQMNSLKPEDTAMYYCAASYEVVDCYPSGYGQDYWGKGTQVTVSS

SEQ ID NO: 33 - protein, 5 aa, Artificial Sequence
  Description of Artificial Sequence: Synthetic peptide
RYCMA

SEQ ID NO: 34 - protein, 17 aa, Artificial Sequence
  Description of Artificial Sequence: Synthetic peptide
AIHPGGGTTYYADSVKG

SEQ ID NO: 35 - protein, 15 aa, Artificial Sequence
  Description of Artificial Sequence: Synthetic peptide
GSLWVPFGDRCAANY

SEQ ID NO: 36 - protein, 124 aa, Artificial Sequence
  Description of Artificial Sequence: Synthetic polypeptide
QVQLQESGGGSVQAGGSLRLSCAASEYTASRYCMAWFRQAPGKEREGVAAIHPGGGTTYYADSVKGRFSISQDSADNTLYLQMNSLKPEDTAMYYCAAGSLWVPFGDRCAANYWGQGTQVTVSS

SEQ ID NO: 37 - protein, 5 aa, Artificial Sequence
  Description of Artificial Sequence: Synthetic peptide
RIHMT

SEQ ID NO: 38 - protein, 16 aa, Artificial Sequence
  Description of Artificial Sequence: Synthetic peptide
SIGSDGRKTYANSVTG

SEQ ID NO: 39 - protein, 14 aa, Artificial Sequence
  Description of Artificial Sequence: Synthetic peptide
EYLYGLGCPDGSAY

SEQ ID NO: 40 - protein, 122 aa, Artificial Sequence
  Description of Artificial Sequence: Synthetic polypeptide
QVQLQESGGGSVQAGGSLRLSCAASGYEYCRIHMTWYRQGPGKEREFVSSIGSDGRKTYANSVTGRFTISRDNANHTVYLQMNSLSPEDTAMYYCKTEYLYGLGCPDGSAYWGQGTQVTVSS

SEQ ID NO: 41 - protein, 5 aa, Artificial Sequence
  Description of Artificial Sequence: Synthetic peptide
SYPMT

SEQ ID NO: 42 - protein, 17 aa, Artificial Sequence
  Description of Artificial Sequence: Synthetic peptide
TIASDGGSTAYAASVEG

SEQ ID NO: 43 - protein, 8 aa, Artificial Sequence
  Description of Artificial Sequence: Synthetic peptide
GYGDGTPA

SEQ ID NO: 44 - protein, 117 aa, Artificial Sequence
  Description of Artificial Sequence: Synthetic polypeptide
QVQLQESGGGLVQPGGSLRLSCTASGFSFSSYPMTWARQAPGKGLEWVSTIASDGGSTAYAASVEGRFTISRDNAKSTLYLQLNSLKTEDTAMYYCTKGYGDGTPAPGQGTQVTVSS

SEQ ID NO: 45 - protein, 5 aa, Artificial Sequence
  Description of Artificial Sequence: Synthetic peptide
SAHMS

SEQ ID NO: 46 - protein, 16 aa, Artificial Sequence
  Description of Artificial Sequence: Synthetic peptide
SIYSGGGTFYADSVKG

SEQ ID NO: 47 - protein, 12 aa, Artificial Sequence
  Description of Artificial Sequence: Synthetic peptide
NRLHYYSDDDSL

SEQ ID NO: 48 - protein, 120 aa, Artificial Sequence
  Description of Artificial Sequence: Synthetic polypeptide
QVQLQESGGGLVQPGGSLRLSCAASGFTFSSAHMSWVRQAPGKGREWIASIYSGGGTFYADSVKGRFTISRDNAKNTLYLQLNSLKAEDTAMYYCATNRLHYYSDDDSLRGQGTQVTVSS

SEQ ID NO: 49 - protein, 5 aa, Artificial Sequence
  Description of Artificial Sequence: Synthetic peptide
DREMN

SEQ ID NO: 50 - protein, 16 aa, Artificial Sequence
  Description of Artificial Sequence: Synthetic peptide
TISSDGSTYYADSVKG

SEQ ID NO: 51 - protein, 13 aa, Artificial Sequence
  Description of Artificial Sequence: Synthetic peptide
DFMIAIQAPGAGC

SEQ ID NO: 52 - protein, 121 aa, Artificial Sequence
  Description of Artificial Sequence: Synthetic polypeptide
QVQLQESGGGSVQAGGSLRLSCTASGFTFDDREMNWYRQAPGNECELVSTISSDGSTYYADSVKGRFTISQDNAKNTVYLQMDSVKPEDTAVYYCAADFMIAIQAPGAGCWGQGTQVTVSS

SEQ ID NO: 53 - protein, 3 aa, Artificial Sequence
  Description of Artificial Sequence: Synthetic peptide
CMG

SEQ ID NO: 54 - protein, 17 aa, Artificial Sequence
  Description of Artificial Sequence: Synthetic peptide
TIYTRGRSIYYADSVKG

SEQ ID NO: 55 - protein, 13 aa, Artificial Sequence
  Description of Artificial Sequence: Synthetic peptide
GGYSWSAGCEFNY

SEQ ID NO: 56 - protein, 119 aa, Artificial Sequence
  Description of Artificial Sequence: Synthetic polypeptide
QVQLQESGGGSVQAGGSLRLSCVASGYTSCMGWFRQAPGKEREAVATIYTRGRSIYYADSVKGRFTISQDNAKNTLYLQMNSLKPEDIAMYSCAAGGYSWSAGCEFNYWGQGTQVTVSS

SEQ ID NO: 57 - protein, 5 aa, Artificial Sequence
  Description of Artificial Sequence: Synthetic peptide
DSDMG

SEQ ID NO: 58 - protein, 16 aa, Artificial Sequence
  Description of Artificial Sequence: Synthetic peptide
TISSDGSTYYADSVKG

SEQ ID NO: 59 - protein, 17 aa, Artificial Sequence
  Description of Artificial Sequence: Synthetic peptide
EPRGYYSNYGGRRECNY

SEQ ID NO: 60 - protein, 125 aa, Artificial Sequence
  Description of Artificial Sequence: Synthetic polypeptide
QVQLQESGGGSVQAGGSLRLSCTASGFTFDDSDMGWYRQAPGNECELVSTISSDGSTYYADSVKGRFTISQDNAKNTVYLQMNSLKPEDTAVYYCAAEPRGYYSNYGGRRECNYWGQGTQVTVSS

SEQ ID NO: 61 - protein, 5 aa, Artificial Sequence
  Description of Artificial Sequence: Synthetic peptide
SYCMG

SEQ ID NO: 62 - protein, 15 aa, Artificial Sequence
  Description of Artificial Sequence: Synthetic peptide
ALGGGSTYYADSVKG

SEQ ID NO: 63 - protein, 20 aa, Artificial Sequence
  Description of Artificial Sequence: Synthetic peptide
AWVACLEFGGSWYDLARYKH

SEQ ID NO: 64 - protein, 127 aa, Artificial Sequence
  Description of Artificial Sequence: Synthetic polypeptide
QVQLQESGGGSVQAGGSLRLSCVASGYTFSSYCMGWFRQAPGKEREGVAALGGGSTYYADSVKGRFTISQDNAKNTLYLQMNSLKPEDTAMYYCAAAWVACLEFGGSWYDLARYKHWGQGTQVTVSS

SEQ ID NO: 65 - protein, 259 aa, Artificial Sequence
  Description of Artificial Sequence: Synthetic polypeptide
QVQLLESGGGLVQPGGSLRLSCAASGVRISTQDMSWVRQAPGKGLEWVSSILTPNGSTYYADSVKGRFTISRDNSKNTLYLQMNSLRAEDTAVYYCAGVDERCEAEDQIDYWGQGTLVTVSSGGGSQVQLQESGGGSVQAGGSLRLSCTASGFTFDDSDMGWYRQAPGNECELVSTISSDGSTYYADSVKGRFTISQDNAKNTVYLQMNSLKPEDTAVYYCAAEPRGYYSNYGGRRECNYWGQGTQVTVSSASHHHHHH

SEQ ID NO: 66 - protein, 250 aa, Artificial Sequence
  Description of Artificial Sequence: Synthetic polypeptide
QVQLLESGGGLVQPGGSLRLSCAASGDMIISEDMSWVRQAPGKGLEWVSTIASDDGSTYYADSVKGRFTISRDNSKNTLYLQMNSLRAEDTAVYYCAGFDAQDAAIEYWGQGTLVTVSSGGGSQVQLQESGGGSVQAGGSLRLSCVASGYTSCMGWFRQAPGKEREAVATIYTRGRSIYYADSVKGRFTISQDNAKNTLYLQMNSLKPEDIAMYSCAAGGYSWSAGCEFNYWGQGTQVTVSSASHHHHHH

SEQ ID NO: 67 - protein, 259 aa, Artificial Sequence
  Description of Artificial Sequence: Synthetic polypeptide
QVQLQESGGGLVQPGGSLKLSCAASGFRFSNYGMSWVRQAPGEGLEWVSYINGDGSRTHYADSVKGRFTISRDNAKNTLYLQLNSLKTEDTAMYYCEKGLSRDGWSLSAASRGQGTQVTVSSGGGSQVQLQESGGGSVQAGGSLRLSCTASGFTFDDSDMGWYRQAPGNECELVSTISSDGSTYYADSVKGRFTISQDNAKNTVYLQMNSLKPEDTAVYYCAAEPRGYYSNYGGRRECNYWGQGTQVTVSSASHHHHHH

SEQ ID NO: 68 - protein, 254 aa, Artificial Sequence
  Description of Artificial Sequence: Synthetic polypeptide
QVQLQESGGGSVQTGGSLRLSCAVSGYTTYSFNYMGWFRQAPGKEREGVAVIYTGGGSTLYADSVKGRFTISQDNAKNTVYLQMNSLKPEDTAMYYCAADDQRFASPLYAYFGYWGQGTQVTVSSGGGSQVQLQESGGGLVQPGGSLRLSCTASGFSFSSYPMTWARQAPGKGLEWVSTIASDGGSTAYAASVEGRFTISRDNAKSTLYLQLNSLKTEDTAMYYCTKGYGDGTPAPGQGTQVTVSSASHHHHHH

SEQ ID NO: 69 - protein, 257 aa, Artificial Sequence
  Description of Artificial Sequence: Synthetic polypeptide
QVQLQESGGGSVQTGGSLRLSCAVSGYTTYSFNYMGWFRQAPGKEREGVAVIYTGGGSTLYADSVKGRFTISQDNAKNTVYLQMNSLKPEDTAMYYCAADDQRFASPLYAYFGYWGQGTQVTVSSGGGSQVQLQESGGGLVQPGGSLRLSCAASGFTFSSAHMSWVRQAPGKGREWIASIYSGGGTFYADSVKGRFTISRDNAKNTLYLQLNSLKAEDTAMYYCATNRLHYYSDDDSLRGQGTQVTVSSASHHHHHH

SEQ ID NO: 70 - protein, 258 aa, Artificial Sequence
  Description of Artificial Sequence: Synthetic polypeptide
QVQLQESGGGSVQTGGSLRLSCAVSGYTTYSFNYMGWFRQAPGKEREGVAVIYTGGGSTLYADSVKGRFTISQDNAKNTVYLQMNSLKPEDTAMYYCAADDQRFASPLYAYFGYWGQGTQVTVSSGGGSQVQLQESGGGSVQAGGSLRLSCTASGFTFDDREMNWYRQAPGNECELVSTISSDGSTYYADSVKGRFTISQDNAKNTVYLQMDSVKPEDTAVYYCAADFMIAIQAPGAGCWGQGTQVTVSSASHHHHHH

SEQ ID NO: 71 - protein, 256 aa, Artificial Sequence
  Description of Artificial Sequence: Synthetic polypeptide
QVQLQESGGGSVQTGGSLRLSCAVSGYTTYSFNYMGWFRQAPGKEREGVAVIYTGGGSTLYADSVKGRFTISQDNAKNTVYLQMNSLKPEDTAMYYCAADDQRFASPLYAYFGYWGQGTQVTVSSGGGSQVQLQESGGGSVQAGGSLRLSCVASGYTSCMGWFRQAPGKEREAVATIYTRGRSIYYADSVKGRFTISQDNAKNTLYLQMNSLKPEDIAMYSCAAGGYSWSAGCEFNYWGQGTQVTVSSASHHHHHH

SEQ ID NO: 72 - protein, 262 aa, Artificial Sequence
  Description of Artificial Sequence: Synthetic polypeptide
QVQLQESGGGSVQTGGSLRLSCAVSGYTTYSFNYMGWFRQAPGKEREGVAVIYTGGGSTLYADSVKGRFTISQDNAKNTVYLQMNSLKPEDTAMYYCAADDQRFASPLYAYFGYWGQGTQVTVSSGGGSQVQLQESGGGSVQAGGSLRLSCTASGFTFDDSDMGWYRQAPGNECELVSTISSDGSTYYADSVKGRFTISQDNAKNTVYLQMNSLKPEDTAVYYCAAEPRGYYSNYGGRRECNYWGQGTQVTVSSASHHHHHH

SEQ ID NO: 73 - protein, 264 aa, Artificial Sequence
  Description of Artificial Sequence: Synthetic polypeptide
QVQLQESGGGSVQTGGSLRLSCAVSGYTTYSFNYMGWFRQAPGKEREGVAVIYTGGGSTLYADSVKGRFTISQDNAKNTVYLQMNSLKPEDTAMYYCAADDQRFASPLYAYFGYWGQGTQVTVSSGGGSQVQLQESGGGSVQAGGSLRLSCVASGYTFSSYCMGWFRQAPGKEREGVAALGGGSTYYADSVKGRFTISQDNAKNTLYLQMNSLKPEDTAMYYCAAAWVACLEFGGSWYDLARYKHWGQGTQVTVSSASHHHHHH

SEQ ID NO: 74 - protein, 245 aa, Artificial Sequence
  Description of Artificial Sequence: Synthetic polypeptide
QVQLQESGGGLVQPGGSLRLSCVASGFTFSNYWIFWVRQAAGKGLEWLSTSNTGGDTTKYADSVKGRFTISRDSAKNTEYLQMNSLKPEDTAVYYCETGRCARSGGYQGTQVTVSSGGGSQVQLQESGGGLVQPGGSLRLSCTASGFSFSSYPMTWARQAPGKGLEWVSTIASDGGSTAYAASVEGRFTISRDNAKSTLYLQLNSLKTEDTAMYYCTKGYGDGTPAPGQGTQVTVSSASHHHHHH

SEQ ID NO: 75 - protein, 249 aa, Artificial Sequence
  Description of Artificial Sequence: Synthetic polypeptide
QVQLQESGGGLVQPGGSLRLSCVASGFTFSNYWIFWVRQAAGKGLEWLSTSNTGGDTTKYADSVKGRFTISRDSAKNTEYLQMNSLKPEDTAVYYCETGRCARSGGYQGTQVTVSSGGGSQVQLQESGGGSVQAGGSLRLSCTASGFTFDDREMNWYRQAPGNECELVSTISSDGSTYYADSVKGRFTISQDNAKNTVYLQMDSVKPEDTAVYYCAADFMIAIQAPGAGCWGQGTQVTVSSASHHHHHH

SEQ ID NO: 76 - protein, 258 aa, Artificial Sequence
  Description of Artificial Sequence: Synthetic polypeptide
QVQLQESGGGSVQVGGSLKLSCAASGYTYSSYYCMGWFRQAPGKEREGVAAIDSDGSTSYADSVKGRFTISQDDAKNTLYLQMNSLKPEDTAMYYCAASYEVVDCYPSGYGQDYWGKGTQVTVSSGGGSQVQLQESGGGSVQAGGSLRLSCTASGFTFDDREMNWYRQAPGNECELVSTISSDGSTYYADSVKGRFTISQDNAKNTVYLQMDSVKPEDTAVYYCAADFMIAIQAPGAGCWGQGTQVTVSSASHHHHHH

SEQ ID NO: 77 - protein, 253 aa, Artificial Sequence
  Description of Artificial Sequence: Synthetic polypeptide
QVQLQESGGGSVQAGGSLRLSCAASEYTASRYCMAWFRQAPGKEREGVAAIHPGGGTTYYADSVKGRFSISQDSADNTLYLQMNSLKPEDTAMYYCAAGSLWVPFGDRCAANYWGQGTQVTVSSGGGSQVQLQESGGGLVQPGGSLRLSCTASGFSFSSYPMTWARQAPGKGLEWVSTIASDGGSTAYAASVEGRFTISRDNAKSTLYLQLNSLKTEDTAMYYCTKGYGDGTPAPGQGTQVTVSSASHHHHHH

SEQ ID NO: 78 - protein, 256 aa, Artificial Sequence
  Description of Artificial Sequence: Synthetic polypeptide
QVQLQESGGGSVQAGGSLRLSCAASEYTASRYCMAWFRQAPGKEREGVAAIHPGGGTTYYADSVKGRFSISQDSADNTLYLQMNSLKPEDTAMYYCAAGSLWVPFGDRCAANYWGQGTQVTVSSGGGSQVQLQESGGGLVQPGGSLRLSCAASGFTFSSAHMSWVRQAPGKGREWIASIYSGGGTFYADSVKGRFTISRDNAKNTLYLQLNSLKAEDTAMYYCATNRLHYYSDDDSLRGQGTQVTVSSASHHHHHH

SEQ ID NO: 79 - protein, 261 aa, Artificial Sequence
  Description of Artificial Sequence: Synthetic polypeptide
QVQLQESGGGSVQAGGSLRLSCAASEYTASRYCMAWFRQAPGKEREGVAAIHPGGGTTYYADSVKGRFSISQDSADNTLYLQMNSLKPEDTAMYYCAAGSLWVPFGDRCAANYWGQGTQVTVSSGGGSQVQLQESGGGSVQAGGSLRLSCTASGFTFDDSDMGWYRQAPGNECELVSTISSDGSTYYADSVKGRFTISQDNAKNTVYLQMNSLKPEDTAVYYCAAEPRGYYSNYGGRRECNYWGQGTQVTVSSASHHHHHH

SEQ ID NO: 80 - protein, 254 aa, Artificial Sequence
  Description of Artificial Sequence: Synthetic polypeptide
QVQLQESGGGSVQAGGSLRLSCAASGYEYCRIHMTWYRQGPGKEREFVSSIGSDGRKTYANSVTGRFTISRDNANHTVYLQMNSLSPEDTAMYYCKTEYLYGLGCPDGSAYWGQGTQVTVSSGGGSQVQLQESGGGLVQPGGSLRLSCAASGFTFSSAHMSWVRQAPGKGREWIASIYSGGGTFYADSVKGRFTISRDNAKNTLYLQLNSLKAEDTAMYYCATNRLHYYSDDDSLRGQGTQVTVSSASHHHHHH

SEQ ID NO: 81 - protein, 248 aa, Artificial Sequence
  Description of Artificial Sequence: Synthetic polypeptide
QVQLQESGGGLVQPGGSLRLSCTASGFSFSSYPMTWARQAPGKGLEWVSTIASDGGSTAYAASVEGRFTISRDNAKSTLYLQLNSLKTEDTAMYYCTKGYGDGTPAPGQGTQVTVSSGGGSQVQLQESGGGSVQAGGSLRLSCVGSGYTYDTSDMSWYRQAPGKEREFVSDIDSGDWAAYADAVKGRFTISRDNAKKTVYLQMNSLEPEDTAMYYCKASYWKWGKLNNFWGPGTQVTVSSASHHHHHH

SEQ ID NO: 82 - protein, 251 aa, Artificial Sequence
  Description of Artificial Sequence: Synthetic polypeptide
QVQLQESGGGLVQPGGSLRLSCTASGFSFSSYPMTWARQAPGKGLEWVSTIASDGGSTAYAASVEGRFTISRDNAKSTLYLQLNSLKTEDTAMYYCTKGYGDGTPAPGQGTQVTVSSGGGSQVQLQESGGGLVQPGGSLKLSCAASGFRFSNYGMSWVRQAPGEGLEWVSYINGDGSRTHYADSVKGRFTISRDNAKNTLYLQLNSLKTEDTAMYYCEKGLSRDGWSLSAASRGQGTQVTVSSASHHHHHH

SEQ ID NO: 83 - protein, 254 aa, Artificial Sequence
  Description of Artificial Sequence: Synthetic polypeptide
QVQLQESGGGLVQPGGSLRLSCTASGFSFSSYPMTWARQAPGKGLEWVSTIASDGGSTAYAASVEGRFTISRDNAKSTLYLQLNSLKTEDTAMYYCTKGYGDGTPAPGQGTQVTVSSGGGSQVQLQESGGGSVQTGGSLRLSCAVSGYTTYSFNYMGWFRQAPGKEREGVAVIYTGGGSTLYADSVKGRFTISQDNAKNTVYLQMNSLKPEDTAMYYCAADDQRFASPLYAYFGYWGQGTQVTVSSASHHHHHH

SEQ ID NO: 84 - protein, 253 aa, Artificial Sequence
  Description of Artificial Sequence: Synthetic polypeptide
QVQLQESGGGLVQPGGSLRLSCTASGFSFSSYPMTWARQAPGKGLEWVSTIASDGGSTAYAASVEGRFTISRDNAKSTLYLQLNSLKTEDTAMYYCTKGYGDGTPAPGQGTQVTVSSGGGSQVQLQESGGGSVQVGGSLRLSCATSGDTKSIRCMGWFRQTPGKEREGIAAIDREGFATYADSVYDRFTIAQDNAQNTLYLEMNALKPEDTAMYYCAAQNMCRVVRGAMTGVDYWGKGTQVTVSSASHHHHHH

SEQ ID NO: 85 - protein, 254 aa, Artificial Sequence
  Description of Artificial Sequence: Synthetic polypeptide
QVQLQESGGGLVQPGGSLRLSCTASGFSFSSYPMTWARQAPGKGLEWVSTIASDGGSTAYAASVEGRFTISRDNAKSTLYLQLNSLKTEDTAMYYCTKGYGDGTPAPGQGTQVTVSSGGGSQVQLQESGGGSVQVGGSLKLSCAASGYTYSSYYCMGWFRQAPGKEREGVAAIDSDGSTSYADSVKGRFTISQDDAKNTLYLQMNSLKPEDTAMYYCAASYEVVDCYPSGYGQDYWGKGTQVTVSSASHHHHHH

SEQ ID NO: 86 - protein, 254 aa, Artificial Sequence
  Description of Artificial Sequence: Synthetic polypeptide
QVQLQESGGGLVQPGGSLRLSCAASGFTFSSAHMSWVRQAPGKGREWIASIYSGGGTFYADSVKGRFTISRDNAKNTLYLQLNSLKAEDTAMYYCATNRLHYYSDDDSLRGQGTQVTVSSGGGSQVQLLESGGGLVQPGGSLRLSCAASGVRISTQDMSWVRQAPGKGLEWVSSILTPNGSTYYADSVKGRFTISRDNSKNTLYLQMNSLRAEDTAVYYCAGVDERCEAEDQIDYWGQGTLVTVSSASHHHHHH

SEQ ID NO: 87 - protein, 251 aa, Artificial Sequence
  Description of Artificial Sequence: Synthetic polypeptide
QVQLQESGGGLVQPGGSLRLSCAASGFTFSSAHMSWVRQAPGKGREWIASIYSGGGTFYADSVKGRFTISRDNAKNTLYLQLNSLKAEDTAMYYCATNRLHYYSDDDSLRGQGTQVTVSSGGGSQVQLLESGGGLVQPGGSLRLSCAASGDMIISEDMSWVRQAPGKGLEWVSTIASDDGSTYYADSVKGRFTISRDNSKNTLYLQMNSLRAEDTAVYYCAGFDAQDAAIEYWGQGTLVTVSSASHHHHHH

SEQ ID NO: 88 - protein, 251 aa, Artificial Sequence
  Description of Artificial Sequence: Synthetic polypeptide
QVQLQESGGGLVQPGGSLRLSCAASGFTFSSAHMSWVRQAPGKGREWIASIYSGGGTFYADSVKGRFTISRDNAKNTLYLQLNSLKAEDTAMYYCATNRLHYYSDDDSLRGQGTQVTVSSGGGSQVQLQESGGGSVQAGGSLRLSCVGSGYTYDTSDMSWYRQAPGKEREFVSDIDSGDWAAYADAVKGRFTISRDNAKKTVYLQMNSLEPEDTAMYYCKASYWKWGKLNNFWGPGTQVTVSSASHHHHHH

SEQ ID NO: 89 - protein, 254 aa, Artificial Sequence
  Description of Artificial Sequence: Synthetic polypeptide
QVQLQESGGGLVQPGGSLRLSCAASGFTFSSAHMSWVRQAPGKGREWIASIYSGGGTFYADSVKGRFTISRDNAKNTLYLQLNSLKAEDTAMYYCATNRLHYYSDDDSLRGQGTQVTVSSGGGSQVQLQESGGGLVQPGGSLKLSCAASGFRFSNYGMSWVRQAPGEGLEWVSYINGDGSRTHYADSVKGRFTISRDNAKNTLYLQLNSLKTEDTAMYYCEKGLSRDGWSLSAASRGQGTQVTVSSASHHHHHH

SEQ ID NO: 90 - protein, 248 aa, Artificial Sequence
  Description of Artificial Sequence: Synthetic polypeptide
QVQLQESGGGLVQPGGSLRLSCAASGFTFSSAHMSWVRQAPGKGREWIASIYSGGGTFYADSVKGRFTISRDNAKNTLYLQLNSLKAEDTAMYYCATNRLHYYSDDDSLRGQGTQVTVSSGGGSQVQLQESGGGLVQPGGSLRLSCVASGFTFSNYWIFWVRQAAGKGLEWLSTSNTGGDTTKYADSVKGRFTISRDSAKNTEYLQMNSLKPEDTAVYYCETGRCARSGGYQGTQVTVSSASHHHHHH

SEQ ID NO: 91 - protein, 256 aa, Artificial Sequence
  Description of Artificial Sequence: Synthetic polypeptide
QVQLQESGGGLVQPGGSLRLSCAASGFTFSSAHMSWVRQAPGKGREWIASIYSGGGTFYADSVKGRFTISRDNAKNTLYLQLNSLKAEDTAMYYCATNRLHYYSDDDSLRGQGTQVTVSSGGGSQVQLQESGGGSVQVGGSLRLSCATSGDTKSIRCMGWFRQTPGKEREGIAAIDREGFATYADSVYDRFTIAQDNAQNTLYLEMNALKPEDTAMYYCAAQNMCRVVRGAMTGVDYWGKGTQVTVSSASHHHHHH

SEQ ID NO: 92 - protein, 255 aa, Artificial Sequence
  Description of Artificial Sequence: Synthetic polypeptide
QVQLQESGGGSVQAGGSLRLSCTASGFTFDDREMNWYRQAPGNECELVSTISSDGSTYYADSVKGRFTISQDNAKNTVYLQMDSVKPEDTAVYYCAADFMIAIQAPGAGCWGQGTQVTVSSGGGSQVQLLESGGGLVQPGGSLRLSCAASGVRISTQDMSWVRQAPGKGLEWVSSILTPNGSTYYADSVKGRFTISRDNSKNTLYLQMNSLRAEDTAVYYCAGVDERCEAEDQIDYWGQGTLVTVSSASHHHHHH

SEQ ID NO: 93 - protein, 255 aa, Artificial Sequence
  Description of Artificial Sequence: Synthetic polypeptide
QVQLQESGGGSVQAGGSLRLSCTASGFTFDDREMNWYRQAPGNECELVSTISSDGSTYYADSVKGRFTISQDNAKNTVYLQMDSVKPEDTAVYYCAADFMIAIQAPGAGCWGQGTQVTVSSGGGSQVQLQESGGGLVQPGGSLKLSCAASGFRFSNYGMSWVRQAPGEGLEWVSYINGDGSRTHYADSVKGRFTISRDNAKNTLYLQLNSLKTEDTAMYYCEKGLSRDGWSLSAASRGQGTQVTVSSASHHHHHH

SEQ ID NO: 94 - protein, 258 aa, Artificial Sequence
  Description of Artificial Sequence: Synthetic polypeptide
QVQLQESGGGSVQAGGSLRLSCTASGFTFDDREMNWYRQAPGNECELVSTISSDGSTYYADSVKGRFTISQDNAKNTVYLQMDSVKPEDTAVYYCAADFMIAIQAPGAGCWGQGTQVTVSSGGGSQVQLQESGGGSVQTGGSLRLSCAVSGYTTYSFNYMGWFRQAPGKEREGVAVIYTGGGSTLYADSVKGRFTISQDNAKNTVYLQMNSLKPEDTAMYYCAADDQRFASPLYAYFGYWGQGTQVTVSSASHHHHHH

SEQ ID NO: 95 - protein, 253 aa, Artificial Sequence
  Description of Artificial Sequence: Synthetic polypeptide
QVQLQESGGGSVQAGGSLRLSCVASGYTSCMGWFRQAPGKEREAVATIYTRGRSIYYADSVKGRFTISQDNAKNTLYLQMNSLKPEDIAMYSCAAGGYSWSAGCEFNYWGQGTQVTVSSGGGSQVQLQESGGGSVQAGGSLRLSCAASGYEYCRIHMTWYRQGPGKEREFVSSIGSDGRKTYANSVTGRFTISRDNANHTVYLQMNSLSPEDTAMYYCKTEYLYGLGCPDGSAYWGQGTQVTVSSASHHHHHH

SEQ ID NO: 96 - protein, 259 aa, Artificial Sequence
  Description of Artificial Sequence: Synthetic polypeptide
QVQLQESGGGSVQAGGSLRLSCTASGFTFDDSDMGWYRQAPGNECELVSTISSDGSTYYADSVKGRFTISQDNAKNTVYLQMNSLKPEDTAVYYCAAEPRGYYSNYGGRRECNYWGQGTQVTVSSGGGSQVQLLESGGGLVQPGGSLRLSCAASGVRISTQDMSWVRQAPGKGLEWVSSILTPNGSTYYADSVKGRFTISRDNSKNTLYLQMNSLRAEDTAVYYCAGVDERCEAEDQIDYWGQGTLVTVSSASHHHHHH

SEQ ID NO: 97 - protein, 256 aa, Artificial Sequence
  Description of Artificial Sequence: Synthetic polypeptide
QVQLQESGGGSVQAGGSLRLSCTASGFTFDDSDMGWYRQAPGNECELVSTISSDGSTYYADSVKGRFTISQDNAKNTVYLQMNSLKPEDTAVYYCAAEPRGYYSNYGGRRECNYWGQGTQVTVSSGGGSQVQLLESGGGLVQPGGSLRLSCAASGDMIISEDMSWVRQAPGKGLEWVSTIASDDGSTYYADSVKGRFTISRDNSKNTLYLQMNSLRAEDTAVYYCAGFDAQDAAIEYWGQGTLVTVSSASHHHHHH

SEQ ID NO: 98 - protein, 256 aa, Artificial Sequence
  Description of Artificial Sequence: Synthetic polypeptide
QVQLQESGGGSVQAGGSLRLSCTASGFTFDDSDMGWYRQAPGNECELVSTISSDGSTYYADSVKGRFTISQDNAKNTVYLQMNSLKPEDTAVYYCAAEPRGYYSNYGGRRECNYWGQGTQVTVSSGGGSQVQLQESGGGSVQAGGSLRLSCVGSGYTYDTSDMSWYRQAPGKEREFVSDIDSGDWAAYADAVKGRFTISRDNAKKTVYLQMNSLEPEDTAMYYCKASYWKWGKLNNFWGPGTQVTVSSASHHHHHH

SEQ ID NO: 99 - protein, 259 aa, Artificial Sequence
  Description of Artificial Sequence: Synthetic polypeptide
QVQLQESGGGSVQAGGSLRLSCTASGFTFDDSDMGWYRQAPGNECELVSTISSDGSTYYADSVKGRFTISQDNAKNTVYLQMNSLKPEDTAVYYCAAEPRGYYSNYGGRRECNYWGQGTQVTVSSGGGSQVQLQESGGGLVQPGGSLKLSCAASGFRFSNYGMSWVRQAPGEGLEWVSYINGDGSRTHYADSVKGRFTISRDNAKNTLYLQLNSLKTEDTAMYYCEKGLSRDGWSLSAASRGQGTQVTVSSASHHHHHH

SEQ ID NO: 100 - protein, 262 aa, Artificial Sequence
  Description of Artificial Sequence: Synthetic polypeptide
QVQLQESGGGSVQAGGSLRLSCTASGFTFDDSDMGWYRQAPGNECELVSTISSDGSTYYADSVKGRFTISQDNAKNTVYLQMNSLKPEDTAVYYCAAEPRGYYSNYGGRRECNYWGQGTQVTVSSGGGSQVQLQESGGGSVQTGGSLRLSCAVSGYTTYSFNYMGWFRQAPGKEREGVAVIYTGGGSTLYADSVKGRFTISQDNAKNTVYLQMNSLKPEDTAMYYCAADDQRFASPLYAYFGYWGQGTQVTVSSASHHHHHH

SEQ ID NO: 101 - protein, 261 aa, Artificial Sequence
  Description of Artificial Sequence: Synthetic polypeptide
QVQLQESGGGSVQAGGSLRLSCTASGFTFDDSDMGWYRQAPGNECELVSTISSDGSTYYADSVKGRFTISQDNAKNTVYLQMNSLKPEDTAVYYCAAEPRGYYSNYGGRRECNYWGQGTQVTVSSGGGSQVQLQESGGGSVQVGGSLRLSCATSGDTKSIRCMGWFRQTPGKEREGIAAIDREGFATYADSVYDRFTIAQDNAQNTLYLEMNALKPEDTAMYYCAAQNMCRVVRGAMTGVDYWGKGTQVTVSSASHHHHHH

SEQ ID NO: 102 - protein, 262 aa, Artificial Sequence
  Description of Artificial Sequence: Synthetic polypeptide
QVQLQESGGGSVQAGGSLRLSCTASGFTFDDSDMGWYRQAPGNECELVSTISSDGSTYYADSVKGRFTISQDNAKNTVYLQMNSLKPEDTAVYYCAAEPRGYYSNYGGRRECNYWGQGTQVTVSSGGGSQVQLQESGGGSVQVGGSLKLSCAASGYTYSSYYCMGWFRQAPGKEREGVAAIDSDGSTSYADSVKGRFTISQDDAKNTLYLQMNSLKPEDTAMYYCAASYEVVDCYPSGYGQDYWGKGTQVTVSSASHHHHHH

SEQ ID NO: 103 - protein, 261 aa, Artificial Sequence
  Description of Artificial Sequence: Synthetic polypeptide
QVQLQESGGGSVQAGGSLRLSCTASGFTFDDSDMGWYRQAPGNECELVSTISSDGSTYYADSVKGRFTISQDNAKNTVYLQMNSLKPEDTAVYYCAAEPRGYYSNYGGRRECNYWGQGTQVTVSSGGGSQVQLQESGGGSVQAGGSLRLSCAASEYTASRYCMAWFRQAPGKEREGVAAIHPGGGTTYYADSVKGRFSISQDSADNTLYLQMNSLKPEDTAMYYCAAGSLWVPFGDRCAANYWGQGTQVTVSSASHHHHHH

SEQ ID NO: 104 - protein, 259 aa, Artificial Sequence
  Description of Artificial Sequence: Synthetic polypeptide
QVQLQESGGGSVQAGGSLRLSCTASGFTFDDSDMGWYRQAPGNECELVSTISSDGSTYYADSVKGRFTISQDNAKNTVYLQMNSLKPEDTAVYYCAAEPRGYYSNYGGRRECNYWGQGTQVTVSSGGGSQVQLQESGGGSVQAGGSLRLSCAASGYEYCRIHMTWYRQGPGKEREFVSSIGSDGRKTYANSVTGRFTISRDNANHTVYLQMNSLSPEDTAMYYCKTEYLYGLGCPDGSAYWGQGTQVTVSSASHHHHHH

SEQ ID NO: 105 - protein, 261 aa, Artificial Sequence
  Description of Artificial Sequence: Synthetic polypeptide
QVQLQESGGGSVQAGGSLRLSCVASGYTFSSYCMGWFRQAPGKEREGVAALGGGSTYYADSVKGRFTISQDNAKNTLYLQMNSLKPEDTAMYYCAAAWVACLEFGGSWYDLARYKHWGQGTQVTVSSGGGSQVQLLESGGGLVQPGGSLRLSCAASGVRISTQDMSWVRQAPGKGLEWVSSILTPNGSTYYADSVKGRFTISRDNSKNTLYLQMNSLRAEDTAVYYCAGVDERCEAEDQIDYWGQGTLVTVSSASHHHHHH

SEQ ID NO: 106 - protein, 263 aa, Artificial Sequence
  Description of Artificial Sequence: Synthetic polypeptide
QVQLQESGGGSVQAGGSLRLSCVASGYTFSSYCMGWFRQAPGKEREGVAALGGGSTYYADSVKGRFTISQDNAKNTLYLQMNSLKPEDTAMYYCAAAWVACLEFGGSWYDLARYKHWGQGTQVTVSSGGGSQVQLQESGGGSVQVGGSLRLSCATSGDTKSIRCMGWFRQTPGKEREGIAAIDREGFATYADSVYDRFTIAQDNAQNTLYLEMNALKPEDTAMYYCAAQNMCRVVRGAMTGVDYWGKGTQVTVSSASHHHHHH

SEQ ID NO: 107 - protein, 4 aa, Artificial Sequence
  Description of Artificial Sequence: Synthetic peptide
GGGS

SEQ ID NO: 108 - protein, 5 aa, Artificial Sequence
  Description of Artificial Sequence: Synthetic peptide
GGGGS

SEQ ID NO: 109 - protein, 6 aa, Artificial Sequence
  Description of Artificial Sequence: Synthetic peptide
GGGGGS

SEQ ID NO: 110 - protein, 4 aa, Artificial Sequence
  Description of Artificial Sequence: Synthetic peptide
GGSG

SEQ ID NO: 111 - protein, 4 aa, Artificial Sequence
  Description of Artificial Sequence: Synthetic peptide
SGGG

SEQ ID NO: 112 - protein, 4 aa, Artificial Sequence
  Description of Artificial Sequence: Synthetic peptide
GSGS

SEQ ID NO: 113 - protein, 6 aa, Artificial Sequence
  Description of Artificial Sequence: Synthetic peptide
GSGSGS

SEQ ID NO: 114 - protein, 8 aa, Artificial Sequence
  Description of Artificial Sequence: Synthetic peptide
GSGSGSGS

SEQ ID NO: 115 - protein, 10 aa, Artificial Sequence
  Description of Artificial Sequence: Synthetic peptide
GSGSGSGSGS

SEQ ID NO: 116 - protein, 12 aa, Artificial Sequence
  Description of Artificial Sequence: Synthetic peptide
GSGSGSGSGSGS

SEQ ID NO: 117 - protein, 6 aa, Artificial Sequence
  Description of Artificial Sequence: Synthetic peptide
GGSGGS

SEQ ID NO: 118 - protein, 9 aa, Artificial Sequence
  Description of Artificial Sequence: Synthetic peptide
GGSGGSGGS

SEQ ID NO: 119 - protein, 12 aa, Artificial Sequence
  Description of Artificial Sequence: Synthetic peptide
GGSGGSGGSGGS

SEQ ID NO: 120 - protein, 8 aa, Artificial Sequence
  Description of Artificial Sequence: Synthetic peptide
GGSGGGSG

SEQ ID NO: 121 - protein, 12 aa, Artificial Sequence
  Description of Artificial Sequence: Synthetic peptide
GGSGGGSGGGSG

SEQ ID NO: 122 - protein, 16 aa, Artificial Sequence
  Description of Artificial Sequence: Synthetic peptide
GGSGGGSGGGSGGGSG

SEQ ID NO: 123 - protein, 20 aa, Artificial Sequence
  Description of Artificial Sequence: Synthetic peptide
GGSGGGSGGGSGGGSGGGSG

SEQ ID NO: 124 - protein, 10 aa, Artificial Sequence
  Description of Artificial Sequence: Synthetic peptide
GGGGSGGGGS

SEQ ID NO: 125 - protein, 15 aa, Artificial Sequence
  Description of Artificial Sequence: Synthetic peptide
GGGGSGGGGSGGGGS

SEQ ID NO: 126 - protein, 8 aa, Artificial Sequence
  Description of Artificial Sequence: Synthetic peptide
ASHHHHHH

SEQ ID NO: 127 - protein, 6 aa, Artificial Sequence
  Description of Artificial Sequence: Synthetic 6xHis tag
HHHHHH

SEQ ID NO: 128 - DNA, 744 bp, Artificial Sequence
  Description of Artificial Sequence: Synthetic polynucleotide
caagtgcagctgcaagagagcggaggaggactggtccagcccggcggctctctgaggctgagctgcactgcttccggcttcagcttcagcagctaccctatgacatgggctaggcaagcccccggcaaaggactggaatgggtgagcactattgccagcgatggaggcagcacagcctacgctgccagcgtggagggaaggttcacaatctctagggacaatgccaagagcacactgtatctgcagctgaactctctgaagacagaggacactgccatgtactactgcactaagggctacggcgatggcacaccagctcccggccaaggcacacaagtgactgtctcgagcggcggaggatcccaggttcagctgcaagaatctggcggcggatctgttcaggctggcggatctctgagactgtcctgtgtcggctctggctacacctacgacacctccgacatgtcctggtacagacaggcccctggcaaagagagagagttcgtcagcgacatcgactccggcgattgggccgcttatgccgatgctgtgaagggcagattcaccatctctcgggacaacgccaagaaaaccgtgtacctgcagatgaactccctggaacctgaggacaccgccatgtactactgcaaggcctcctactggaagtggggcaagctgaacaacttctggggccctggcacacaagtgaccgtttcttctgctagccaccatcaccatcaccac

SEQ ID NO: 129 - DNA, 753 bp, Artificial Sequence
  Description of Artificial Sequence: Synthetic polynucleotide
caagtgcagctgcaagagagcggaggaggactggtccagcccggcggctctctgaggctgagctgcactgcttccggcttcagcttcagcagctaccctatgacatgggctaggcaagcccccggcaaaggactggaatgggtgagcactattgccagcgatggaggcagcacagcctacgctgccagcgtggagggaaggttcacaatctctagggacaatgccaagagcacactgtatctgcagctgaactctctgaagacagaggacactgccatgtactactgcactaagggctacggcgatggcacaccagctcccggccaaggcacacaagtgactgtctcgagcggcggaggatcccaggttcagctgcaagagtctggcggaggattggttcagcctggcggatctctgaagctgtcttgtgccgcctccggcttccggttctctaactacggaatgtcctgggtccgacaggctcctggcgaaggacttgagtgggtgtcctacatcaacggcgacggcagcagaacccactacgccgattctgtgaagggcagattcaccatcagccgggacaacgccaagaacaccctgtacctgcagctcaactccctgaaaaccgaggacaccgccatgtactactgcgagaagggcctgtccagagatggctggtcactgtctgctgcttctagaggccagggcacccaagtgacagtttcttctgctagccaccatcaccatcaccac

SEQ ID NO: 130 - DNA, 762 bp, Artificial Sequence
  Description of Artificial Sequence: Synthetic polynucleotide
caagtgcagctgcaagagagcggaggaggactggtccagcccggcggctctctgaggctgagctgcactgcttccggcttcagcttcagcagctaccctatgacatgggctaggcaagcccccggcaaaggactggaatgggtgagcactattgccagcgatggaggcagcacagcctacgctgccagcgtggagggaaggttcacaatctctagggacaatgccaagagcacactgtatctgcagctgaactctctgaagacagaggacactgccatgtactactgcactaagggctacggcgatggcacaccagctcccggccaaggcacacaagtgactgtctcgagcggcggaggatcccaggttcagctgcaagaatctggcggcggatctgttcagacaggcggctctctgagactgtcctgtgctgtgtccggctacaccacctacagcttcaactacatgggctggttcaggcaggcccctggcaaagaacgagaaggcgtggccgtgatctataccggcggaggctctaccctgtacgccgactctgtgaagggcagattcaccatcagccaggacaacgccaagaacaccgtgtacctgcagatgaactccctgaagcctgaggacaccgccatgtactactgtgccgccgacgaccagagattcgcctctcctctgtacgcctacttcggctattggggccagggcacccaagtgacagtttcttctgctagccaccatcaccatcaccac

SEQ ID NO: 131 - DNA, 759 bp, Artificial Sequence
  Description of Artificial Sequence: Synthetic polynucleotide
caagtgcagctgcaagagagcggaggaggactggtccagcccggcggctctctgaggctgagctgcactgcttccggcttcagcttcagcagctaccctatgacatgggctaggcaagcccccggcaaaggactggaatgggtgagcactattgccagcgatggaggcagcacagcctacgctgccagcgtggagggaaggttcacaatctctagggacaatgccaagagcacactgtatctgcagctgaactctctgaagacagaggacactgccatgtactactgcactaagggctacggcgatggcacaccagctcccggccaaggcacacaagtgactgtctcgagcggcggaggatcccaggttcagctgcaagaatctggcggaggctctgtgcaagtcggcggatctctgagactgtcctgtgccacctctggcgacaccaagtctatcagatgcatgggctggttccggcagacccctggcaaagagagagagggaatcgccgccatcgacagagagggctttgccacctacgccgactccgtgtacgacagattcacaatcgcccaggacaacgcccagaacaccctgtacctggaaatgaacgccctgaagcctgaggacaccgccatgtactactgcgccgctcagaacatgtgcagagtcgtgcggggagctatgaccggcgttgactattggggcaagggcacccaagtgaccgtttcttctgctagccaccatcaccatcaccac

SEQ ID NO: 132 - DNA, 762 bp, Artificial Sequence
  Description of Artificial Sequence: Synthetic polynucleotide
caagtgcagctgcaagagagcggaggaggactggtccagcccggcggctctctgaggctgagctgcactgcttccggcttcagcttcagcagctaccctatgacatgggctaggcaagcccccggcaaaggactggaatgggtgagcactattgccagcgatggaggcagcacagcctacgctgccagcgtggagggaaggttcacaatctctagggacaatgccaagagcacactgtatctgcagctgaactctctgaagacagaggacactgccatgtactactgcactaagggctacggcgatggcacaccagctcccggccaaggcacacaagtgactgtctcgagcggcggaggatcccaggttcagctgcaagaatctggcggaggctctgtgcaagtcggcggatctctgaagctgtcttgtgccgcctccggctacacctactccagctactactgcatgggctggttcagacaggcccctggcaaagagagagaaggcgtcgccgccatcgactctgatggctctacctcttacgccgactccgtgaagggcagattcaccatctctcaggacgacgccaagaacaccctgtacctgcagatgaactccctgaagcctgaggacaccgccatgtactactgcgccgcttcttacgaggtggtggactgctacccttctggctacggccaggattattggggcaagggcacccaagtgaccgtttcttctgctagccaccatcaccatcaccac

SEQ ID NO: 133 - DNA, 762 bp, Artificial Sequence
  Description of Artificial Sequence: Synthetic polynucleotide
caagtgcagctgcaagagagcggaggaggactggtgcagcccggcggctctctgaggctgagctgtgctgccagcggcttcactttcagcagcgctcacatgagctgggtgaggcaagcccccggcaaaggaagggagtggatcgcctccatctacagcggcggcggaacattctacgccgacagcgtgaagggaaggttcacaatctctagggacaacgccaagaacacactgtatctgcagctgaactctctgaaggccgaggacactgccatgtactactgcgccactaataggctgcactactacagcgacgatgattctctgaggggccaaggcacacaagtgacagtctcgagcggcggaggatcccaggttcagctgctggaatctggcggaggattggttcagcctggcggctctctgagactgtcttgtgctgcttctggcgtgcggatcagcacccaggatatgagctgggtccgacaggctcctggcaaaggactggaatgggtgtcctccatcctgacacctaacggctccacctactacgccgactccgtgaagggcagattcaccatctctcgggacaactccaagaacaccctgtacctgcagatgaactccctgagagccgaggacaccgccgtgtactattgtgctggcgtggacgagagatgcgaggccgaggatcagatcgattattggggccagggcaccctggtcaccgtttcttctgctagccaccatcaccatcaccac

SEQ ID NO: 134 - DNA, 753 bp, Artificial Sequence
  Description of Artificial Sequence: Synthetic polynucleotide
caagtgcagctgcaagagagcggaggaggactggtgcagcccggcggctctctgaggctgagctgtgctgccagcggcttcactttcagcagcgctcacatgagctgggtgaggcaagcccccggcaaaggaagggagtggatcgcctccatctacagcggcggcggaacattctacgccgacagcgtgaagggaaggttcacaatctctagggacaacgccaagaacacactgtatctgcagctgaactctctgaaggccgaggacactgccatgtactactgcgccactaataggctgcactactacagcgacgatgattctctgaggggccaaggcacacaagtgacagtctcgagcggcggaggatcccaggttcagctgctggaatctggcggaggattggttcagcctggcggctctctgagactgtcttgtgctgcctctggcgacatgatcatctccgaggacatgagctgggtccgacaggctcctggcaaaggactggaatgggtgtccacaatcgcctccgacgacggctctacctactacgccgattccgtgaagggcagattcaccatcagccgggacaactccaagaacaccctgtacctgcagatgaactccctgagagccgaggacaccgccgtgtactattgtgccggcttcgatgcccaggatgccgccattgaatattggggccagggcaccctggtcaccgtttcttctgctagccaccatcaccatcaccac

SEQ ID NO: 135 - DNA, 753 bp, Artificial Sequence
  Description of Artificial Sequence: Synthetic polynucleotide
caagtgcagctgcaagagagcggaggaggactggtgcagcccggcggctctctgaggctgagctgtgctgccagcggcttcactttcagcagcgctcacatgagctgggtgaggcaagcccccggcaaaggaagggagtggatcgcctccatctacagcggcggcggaacattctacgccgacagcgtgaagggaaggttcacaatctctagggacaacgccaagaacacactgtatctgcagctgaactctctgaaggccgaggacactgccatgtactactgcgccactaataggctgcactactacagcgacgatgattctctgaggggccaaggcacacaagtgacagtctcgagcggcggaggatcccaggttcagctgcaagaatctggcggcggatctgttcaggctggcggatctctgagactgtcctgtgtcggctctggctacacctacgacacctccgacatgtcctggtacagacaggcccctggcaaagagagagagttcgtcagcgacatcgactccggcgattgggccgcttatgccgatgctgtgaagggcagattcaccatctctcgggacaacgccaagaaaaccgtgtacctgcagatgaactccctggaacctgaggacaccgccatgtactactgcaaggcctcctactggaagtggggcaagctgaacaacttctggggccctggcacacaagtgaccgtttcttctgctagccaccatcaccatcaccac

SEQ ID NO: 136 - DNA, 762 bp, Artificial Sequence
  Description of Artificial Sequence: Synthetic polynucleotide
caagtgcagctgcaagagagcggaggaggactggtgcagcccggcggctctctgaggctgagctgtgctgccagcggcttcactttcagcagcgctcacatgagctgggtgaggcaagcccccggcaaaggaagggagtggatcgcctccatctacagcggcggcggaacattctacgccgacagcgtgaagggaaggttcacaatctctagggacaacgccaagaacacactgtatctgcagctgaactctctgaaggccgaggacactgccatgtactactgcgccactaataggctgcactactacagcgacgatgattctctgaggggccaaggcacacaagtgacagtctcgagcggcggaggatcccaggttcagctgcaagagtctggcggaggattggttcagcctggcggatctctgaagctgtcttgtgccgcctccggcttccggttctctaactacggaatgtcctgggtccgacaggctcctggcgaaggacttgagtgggtgtcctacatcaacggcgacggcagcagaacccactacgccgattctgtgaagggcagattcaccatcagccgggacaacgccaagaacaccctgtacctgcagctcaactccctgaaaaccgaggacaccgccatgtactactgcgagaagggcctgtccagagatggctggtcactgtctgctgcttctagaggccagggcacccaagtgacagtttcttctgctagccaccatcaccatcaccac

SEQ ID NO: 137 - DNA, 744 bp, Artificial Sequence
  Description of Artificial Sequence: Synthetic polynucleotide
caagtgcagctgcaagagagcggaggaggactggtgcagcccggcggctctctgaggctgagctgtgctgccagcggcttcactttcagcagcgctcacatgagctgggtgaggcaagcccccggcaaaggaagggagtggatcgcctccatctacagcggcggcggaacattctacgccgacagcgtgaagggaaggttcacaatctctagggacaacgccaagaacacactgtatctgcagctgaactctctgaaggccgaggacactgccatgtactactgcgccactaataggctgcactactacagcgacgatgattctctgaggggccaaggcacacaagtgacagtctcgagcggcggaggatcccaggttcagctgcaagagtctggcggaggattggttcagcctggcggatctctgagactgtcctgtgtggcctctggcttcaccttctccaactactggatcttctgggtccgacaggccgctggcaaaggactggaatggctgtccacctctaacaccggcggagacaccactaagtacgccgactctgtgaagggcagattcaccatctccagagacagcgccaagaacaccgagtacctgcagatgaactccctgaagcctgaggacaccgccgtgtactactgcgagacaggcagatgcgctagatccggcggctatcagggcacccaagtgacagtttcttctgctagccaccatcaccatcaccac

SEQ ID NO: 138 - DNA, 768 bp, Artificial Sequence
  Description of Artificial Sequence: Synthetic polynucleotide
caagtgcagctgcaagagagcggaggaggactggtgcagcccggcggctctctgaggctgagctgtgctgccagcggcttcactttcagcagcgctcacatgagctgggtgaggcaagcccccggcaaaggaagggagtggatcgcctccatctacagcggcggcggaacattctacgccgacagcgtgaagggaaggttcacaatctctagggacaacgccaagaacacactgtatctgcagctgaactctctgaaggccgaggacactgccatgtactactgcgccactaataggctgcactactacagcgacgatgattctctgaggggccaaggcacacaagtgacagtctcgagcggcggaggatcccaggttcagctgcaagaatctggcggaggctctgtgcaagtcggcggatctctgagactgtcctgtgccacctctggcgacaccaagtctatcagatgcatgggctggttccggcagacccctggcaaagagagagagggaatcgccgccatcgacagagagggctttgccacctacgccgactccgtgtacgacagattcacaatcgcccaggacaacgcccagaacaccctgtacctggaaatgaacgccctgaagcctgaggacaccgccatgtactactgcgccgctcagaacatgtgcagagtcgtgcggggagctatgaccggcgttgactattggggcaagggcacccaagtgaccgtttcttctgctagccaccatcaccatcaccac

SEQ ID NO: 139 - DNA, 765 bp, Artificial Sequence
  Description of Artificial Sequence: Synthetic polynucleotide
caagtgcagctgcaagagagcggaggaggaagcgtgcaagccggcggatctctgagactcagctgtactgcctccggcttcacattcgacgatagggagatgaactggtataggcaagcccccggcaatgagtgcgagctggtgagcacaatctccagcgatggcagcacttactacgccgatagcgtgaagggaaggttcactatctcccaagataacgccaagaacacagtctatctgcagatggactccgtcaagccagaggatactgccgtgtactactgcgccgccgacttcatgatcgccatccaagcccccggcgctggctgttggggacaaggcactcaagtgacagtctcgagcggcggaggatcccaggttcagctgctggaatctggcggaggattggttcagcctggcggctctctgagactgtcttgtgctgcttctggcgtgcggatcagcacccaggatatgagctgggtccgacaggctcctggcaaaggactggaatgggtgtcctccatcctgacacctaacggctccacctactacgccgactccgtgaagggcagattcaccatctctcgggacaactccaagaacaccctgtacctgcagatgaactccctgagagccgaggacaccgccgtgtactattgtgctggcgtggacgagagatgcgaggccgaggatcagatcgattattggggccagggcaccctggtcaccgtttcttctgctagccaccatcaccatcaccac

SEQ ID NO: 140 - DNA, 765 bp, Artificial Sequence
  Description of Artificial Sequence: Synthetic polynucleotide
caagtgcagctgcaagagagcggaggaggaagcgtgcaagccggcggatctctgagactcagctgtactgcctccggcttcacattcgacgatagggagatgaactggtataggcaagcccccggcaatgagtgcgagctggtgagcacaatctccagcgatggcagcacttactacgccgatagcgtgaagggaaggttcactatctcccaagataacgccaagaacacagtctatctgcagatggactccgtcaagccagaggatactgccgtgtactactgcgccgccgacttcatgatcgccatccaagcccccggcgctggctgttggggacaaggcactcaagtgacagtctcgagcggcggaggatcccaggttcagctgcaagagtctggcggaggattggttcagcctggcggatctctgaagctgtcttgtgccgcctccggcttccggttctctaactacggaatgtcctgggtccgacaggctcctggcgaaggacttgagtgggtgtcctacatcaacggcgacggcagcagaacccactacgccgattctgtgaagggcagattcaccatcagccgggacaacgccaagaacaccctgtacctgcagctcaactccctgaaaaccgaggacaccgccatgtactactgcgagaagggcctgtccagagatggctggtcactgtctgctgcttctagaggccagggcacccaagtgacagtttcttctgctagccaccatcaccatcaccac

SEQ ID NO: 141 - DNA, 774 bp, Artificial Sequence
  Description of Artificial Sequence: Synthetic polynucleotide
caagtgcagctgcaagagagcggaggaggaagcgtgcaagccggcggatctctgagactcagctgtactgcctccggcttcacattcgacgatagggagatgaactggtataggcaagcccccggcaatgagtgcgagctggtgagcacaatctccagcgatggcagcacttactacgccgatagcgtgaagggaaggttcactatctcccaagataacgccaagaacacagtctatctgcagatggactccgtcaagccagaggatactgccgtgtactactgcgccgccgacttcatgatcgccatccaagcccccggcgctggctgttggggacaaggcactcaagtgacagtctcgagcggcggaggatcccaggttcagctgcaagaatctggcggcggatctgttcagacaggcggctctctgagactgtcctgtgctgtgtccggctacaccacctacagcttcaactacatgggctggttcaggcaggcccctggcaaagaacgagaaggcgtggccgtgatctataccggcggaggctctaccctgtacgccgactctgtgaagggcagattcaccatcagccaggacaacgccaagaacaccgtgtacctgcagatgaactccctgaagcctgaggacaccgccatgtactactgtgccgccgacgaccagagattcgcctctcctctgtacgcctacttcggctattggggccagggcacccaagtgacagtttcttctgctagccaccatcaccatcaccac

SEQ ID NO: 142 - DNA, 759 bp, Artificial Sequence
  Description of Artificial Sequence: Synthetic polynucleotide
caagtgcagctgcaagagagcggaggaggcagcgtgcaagccggaggctctctgagactgagctgtgtggccagcggctacacaagctgcatgggctggtttaggcaagcccccggcaaggagagagaggccgtggccacaatctacactaggggaaggagcatctactacgccgacagcgtgaaaggaaggttcacaatcagccaagataacgccaagaacactctgtatctgcagatgaacagcctcaagccagaggacatcgccatgtatagctgtgctgctggcggctatagctggagcgctggctgcgagttcaattactggggccaaggcacacaagtgactgtctcgagcggcggaggatcccaggttcagctgcaagaatctggcggcggatctgttcaggctggcggatctctgagactgtcttgtgccgcttccggctacgagtactgcagaatccacatgacctggtacagacaaggccctggcaaagagagagagttcgtcagctccatcggctccgacggcagaaagacctacgccaattctgtgaccggcagattcaccatcagccgggacaacgccaaccacaccgtgtacctgcagatgaactccctgtctcctgaggacaccgccatgtactactgcaagaccgagtacctgtacggcctgggctgtcctgatggctctgcttattggggccagggcacccaagtgaccgtttcttctgctagccaccatcaccatcaccac

SEQ ID NO: 143 - DNA, 777 bp, Artificial Sequence
  Description of Artificial Sequence: Synthetic polynucleotide
caagtgcagctgcaagagagcggaggcggaagcgtgcaagctggaggatctctgaggctgagctgcacagccagcggcttcactttcgatgacagcgacatgggctggtataggcaagcccccggcaatgagtgtgagctggtgagcacaatcagcagcgacggctccacttactacgccgacagcgtcaagggaaggttcacaatcagccaagataacgccaagaacactgtgtatctgcagatgaactctctgaagccagaggacacagccgtgtactactgtgctgccgagcctaggggctactatagcaactacggcggaaggagggagtgcaattactggggccaaggcacacaagtgacagtctcgagcggcggaggatcccaggttcagctgctggaatctggcggaggattggttcagcctggcggctctctgagactgtcttgtgctgcttctggcgtgcggatcagcacccaggatatgagctgggtccgacaggctcctggcaaaggactggaatgggtgtcctccatcctgacacctaacggctccacctactacgccgactccgtgaagggcagattcaccatctctcgggacaactccaagaacaccctgtacctgcagatgaactccctgagagccgaggacaccgccgtgtactattgtgctggcgtggacgagagatgcgaggccgaggatcagatcgattattggggccagggcaccctggtcaccgtttcttctgctagccaccatcaccatcaccac

SEQ ID NO: 144 - DNA, 768 bp, Artificial Sequence
  Description of Artificial Sequence: Synthetic polynucleotide
caagtgcagctgcaagagagcggaggcggaagcgtgcaagctggaggatctctgaggctgagctgcacagccagcggcttcactttcgatgacagcgacatgggctggtataggcaagcccccggcaatgagtgtgagctggtgagcacaatcagcagcgacggctccacttactacgccgacagcgtcaagggaaggttcacaatcagccaagataacgccaagaacactgtgtatctgcagatgaactctctgaagccagaggacacagccgtgtactactgtgctgccgagcctaggggctactatagcaactacggcggaaggagggagtgcaattactggggccaaggcacacaagtgacagtctcgagcggcggaggatcccaggttcagctgctggaatctggcggaggattggttcagcctggcggctctctgagactgtcttgtgctgcctctggcgacatgatcatctccgaggacatgagctgggtccgacaggctcctggcaaaggactggaatgggtgtccacaatcgcctccgacgacggctctacctactacgccgattccgtgaagggcagattcaccatcagccgggacaactccaagaacaccctgtacctgcagatgaactccctgagagccgaggacaccgccgtgtactattgtgccggcttcgatgcccaggatgccgccattgaatattggggccagggcaccctggtcaccgtttcttctgctagccaccatcaccatcaccac

SEQ ID NO: 145 - DNA, 768 bp, Artificial Sequence
  Description of Artificial Sequence: Synthetic polynucleotide
caagtgcagctgcaagagagcggaggcggaagcgtgcaagctggaggatctctgaggctgagctgcacagccagcggcttcactttcgatgacagcgacatgggctggtataggcaagcccccggcaatgagtgtgagctggtgagcacaatcagcagcgacggctccacttactacgccgacagcgtcaagggaaggttcacaatcagccaagataacgccaagaacactgtgtatctgcagatgaactctctgaagccagaggacacagccgtgtactactgtgctgccgagcctaggggctactatagcaactacggcggaaggagggagtgcaattactggggccaaggcacacaagtgacagtctcgagcggcggaggatcccaggttcagctgcaagaatctggcggcggatctgttcaggctggcggatctctgagactgtcctgtgtcggctctggctacacctacgacacctccgacatgtcctggtacagacaggcccctggcaaagagagagagttcgtcagcgacatcgactccggcgattgggccgcttatgccgatgctgtgaagggcagattcaccatctctcgggacaacgccaagaaaaccgtgtacctgcagatgaactccctggaacctgaggacaccgccatgtactactgcaaggcctcctactggaagtggggcaagctgaacaacttctggggccctggcacacaagtgaccgtttcttctgctagccaccatcaccatcaccac

SEQ ID NO: 146 - DNA, 777 bp, Artificial Sequence
  Description of Artificial Sequence: Synthetic polynucleotide
caagtgcagctgcaagagagcggaggcggaagcgtgcaagctggaggatctctgaggctgagctgcacagccagcggcttcactttcgatgacagcgacatgggctggtataggcaagcccccggcaatgagtgtgagctggtgagcacaatcagcagcgacggctccacttactacgccgacagcgtcaagggaaggttcacaatcagccaagataacgccaagaacactgtgtatctgcagatgaactctctgaagccagaggacacagccgtgtactactgtgctgccgagcctaggggctactatagcaactacggcggaaggagggagtgcaattactggggccaaggcacacaagtgacagtctcgagcggcggaggatcccaggttcagctgcaagagtctggcggaggattggttcagcctggcggatctctgaagctgtcttgtgccgcctccggcttccggttctctaactacggaatgtcctgggtccgacaggctcctggcgaaggacttgagtgggtgtcctacatcaacggcgacggcagcagaacccactacgccgattctgtgaagggcagattcaccatcagccgggacaacgccaagaacaccctgtacctgcagctcaactccctgaaaaccgaggacaccgccatgtactactgcgagaagggcctgtccagagatggctggtcactgtctgctgcttctagaggccagggcacccaagtgacagtttcttctgctagccaccatcaccatcaccac

SEQ ID NO: 147 - DNA, 786 bp, Artificial Sequence
  Description of Artificial Sequence: Synthetic polynucleotide
caagtgcagctgcaagagagcggaggcggaagcgtgcaagctggaggatctctgaggctgagctgcacagccagcggcttcactttcgatgacagcgacatgggctggtataggcaagcccccggcaatgagtgtgagctggtgagcacaatcagcagcgacggctccacttactacgccgacagcgtcaagggaaggttcacaatcagccaagataacgccaagaacactgtgtatctgcagatgaactctctgaagccagaggacacagccgtgtactactgtgctgccgagcctaggggctactatagcaactacggcggaaggagggagtgcaattactggggccaaggcacacaagtgacagtctcgagcggcggaggatcccaggttcagctgcaagaatctggcggcggatctgttcagacaggcggctctctgagactgtcctgtgctgtgtccggctacaccacctacagcttcaactacatgggctggttcaggcaggcccctggcaaagaacgagaaggcgtggccgtgatctataccggcggaggctctaccctgtacgccgactctgtgaagggcagattcaccatcagccaggacaacgccaagaacaccgtgtacctgcagatgaactccctgaagcctgaggacaccgccatgtactactgtgccgccgacgaccagagattcgcctctcctctgtacgcctacttcggctattggggccagggcacccaagtgacagtttcttctgctagccaccatcaccatcaccac

SEQ ID NO: 148 - DNA, 783 bp, Artificial Sequence
  Description of Artificial Sequence: Synthetic polynucleotide
caagtgcagctgcaagagagcggaggcggaagcgtgcaagctggaggatctctgaggctgagctgcacagccagcggcttcactttcgatgacagcgacatgggctggtataggcaagcccccggcaatgagtgtgagctggtgagcacaatcagcagcgacggctccacttactacgccgacagcgtcaagggaaggttcacaatcagccaagataacgccaagaacactgtgtatctgcagatgaactctctgaagccagaggacacagccgtgtactactgtgctgccgagcctaggggctactatagcaactacggcggaaggagggagtgcaattactggggccaaggcacacaagtgacagtctcgagcggcggaggatcccaggttcagctgcaagaatctggcggaggctctgtgcaagtcggcggatctctgagactgtcctgtgccacctctggcgacaccaagtctatcagatgcatgggctggttccggcagacccctggcaaagagagagagggaatcgccgccatcgacagagagggctttgccacctacgccgactccgtgtacgacagattcacaatcgcccaggacaacgcccagaacaccctgtacctggaaatgaacgccctgaagcctgaggacaccgccatgtactactgcgccgctcagaacatgtgcagagtcgtgcggggagctatgaccggcgttgactattggggcaagggcacccaagtgaccgtttcttctgctagccaccatcaccatcaccac

SEQ ID NO: 149 - DNA, 786 bp, Artificial Sequence
  Description of Artificial Sequence: Synthetic polynucleotide
caagtgcagctgcaagagagcggaggcggaagcgtgcaagctggaggatctctgaggctgagctgcacagccagcggcttcactttcgatgacagcgacatgggctggtataggcaagcccccggcaatgagtgtgagctggtgagcacaatcagcagcgacggctccacttactacgccgacagcgtcaagggaaggttcacaatcagccaagataacgccaagaacactgtgtatctgcagatgaactctctgaagccagaggacacagccgtgtactactgtgctgccgagcctaggggctactatagcaactacggcggaaggagggagtgcaattactggggccaaggcacacaagtgacagtctcgagcggcggaggatcccaggttcagctgcaagaatctggcggaggctctgtgcaagtcggcggatctctgaagctgtcttgtgccgcctccggctacacctactccagctactactgcatgggctggttcagacaggcccctggcaaagagagagaaggcgtcgccgccatcgactctgatggctctacctcttacgccgactccgtgaagggcagattcaccatctctcaggacgacgccaagaacaccctgtacctgcagatgaactccctgaagcctgaggacaccgccatgtactactgcgccgcttcttacgaggtggtggactgctacccttctggctacggccaggattattggggcaagggcacccaagtgaccgtttcttctgctagccaccatcaccatcaccac

SEQ ID NO: 150 - DNA, 783 bp, Artificial Sequence
  Description of Artificial Sequence: Synthetic polynucleotide
caagtgcagctgcaagagagcggaggcggaagcgtgcaagctggaggatctctgaggctgagctgcacagccagcggcttcactttcgatgacagcgacatgggctggtataggcaagcccccggcaatgagtgtgagctggtgagcacaatcagcagcgacggctccacttactacgccgacagcgtcaagggaaggttcacaatcagccaagataacgccaagaacactgtgtatctgcagatgaactctctgaagccagaggacacagccgtgtactactgtgctgccgagcctaggggctactatagcaactacggcggaaggagggagtgcaattactggggccaaggcacacaagtgacagtctcgagcggcggaggatcccaggttcagctgcaagaatctggcggcggatctgttcaggctggcggatctctgagactgtcttgtgccgcctccgagtacaccgcctccagatactgtatggcctggttcagacaggcccctggcaaagagagagaaggcgtcgccgctattcatcctggcggaggcaccacctactacgccgattctgtgaagggcagattctccatcagccaggactccgccgacaacaccctgtacctgcagatgaactccctgaagcctgaggacaccgccatgtactactgtgccgctggatctctgtgggtgcccttcggcgatagatgtgccgctaattattggggccagggcacacaagtgaccgtttcttctgctagccaccatcaccatcaccac

SEQ ID NO: 151 - DNA, 777 bp, Artificial Sequence
  Description of Artificial Sequence: Synthetic polynucleotide
caagtgcagctgcaagagagcggaggcggaagcgtgcaagctggaggatctctgaggctgagctgcacagccagcggcttcactttcgatgacagcgacatgggctggtataggcaagcccccggcaatgagtgtgagctggtgagcacaatcagcagcgacggctccacttactacgccgacagcgtcaagggaaggttcacaatcagccaagataacgccaagaacactgtgtatctgcagatgaactctctgaagccagaggacacagccgtgtactactgtgctgccgagcctaggggctactatagcaactacggcggaaggagggagtgcaattactggggccaaggcacacaagtgacagtctcgagcggcggaggatcccaggttcagctgcaagaatctggcggcggatctgttcaggctggcggatctctgagactgtcttgtgccgcttccggctacgagtactgcagaatccacatgacctggtacagacaaggccctggcaaagagagagagttcgtcagctccatcggctccgacggcagaaagacctacgccaattctgtgaccggcagattcaccatcagccgggacaacgccaaccacaccgtgtacctgcagatgaactccctgtctcctgaggacaccgccatgtactactgcaagaccgagtacctgtacggcctgggctgtcctgatggctctgcttattggggccagggcacccaagtgaccgtttcttctgctagccaccatcaccatcaccac

SEQ ID NO: 152 - DNA, 783 bp, Artificial Sequence
  Description of Artificial Sequence: Synthetic polynucleotide
caagtgcagctgcaagagagcggaggaggaagcgtgcaagccggaggctctctgaggctgagctgtgtggccagcggctacactttcagcagctactgcatgggctggttcagacaagcccccggcaaggaaagggaaggagtggccgctctgggcggaggaagcacatactacgctgacagcgtgaagggaaggttcacaatcagccaagataacgccaagaacacactgtatctgcagatgaactctctgaagccagaggacacagccatgtactactgtgccgctgcttgggtcgcttgtctggagttcggcggcagctggtacgatctggctaggtacaagcactggggccaaggcacacaagtgacagtctcgagcggcggaggatcccaggttcagctgctggaatctggcggaggattggttcagcctggcggctctctgagactgtcttgtgctgcttctggcgtgcggatcagcacccaggatatgagctgggtccgacaggctcctggcaaaggactggaatgggtgtcctccatcctgacacctaacggctccacctactacgccgactccgtgaagggcagattcaccatctctcgggacaactccaagaacaccctgtacctgcagatgaactccctgagagccgaggacaccgccgtgtactattgtgctggcgtggacgagagatgcgaggccgaggatcagatcgattattggggccagggcaccctggtcaccgtttcttctgctagccaccatcaccatcaccac

SEQ ID NO: 153 - DNA, 789 bp, Artificial Sequence
  Description of Artificial Sequence: Synthetic polynucleotide
caagtgcagctgcaagagagcggaggaggaagcgtgcaagccggaggctctctgaggctgagctgtgtggccagcggctacactttcagcagctactgcatgggctggttcagacaagcccccggcaaggaaagggaaggagtggccgctctgggcggaggaagcacatactacgctgacagcgtgaagggaaggttcacaatcagccaagataacgccaagaacacactgtatctgcagatgaactctctgaagccagaggacacagccatgtactactgtgccgctgcttgggtcgcttgtctggagttcggcggcagctggtacgatctggctaggtacaagcactggggccaaggcacacaagtgacagtctcgagcggcggaggatcccaggttcagctgcaagaatctggcggaggctctgtgcaagtcggcggatctctgagactgtcctgtgccacctctggcgacaccaagtctatcagatgcatgggctggttccggcagacccctggcaaagagagagagggaatcgccgccatcgacagagagggctttgccacctacgccgactccgtgtacgacagattcacaatcgcccaggacaacgcccagaacaccctgtacctggaaatgaacgccctgaagcctgaggacaccgccatgtactactgcgccgctcagaacatgtgcagagtcgtgcggggagctatgaccggcgttgactattggggcaagggcacccaagtgaccgtttcttctgctagccaccatcaccatcaccac

SEQ ID NO: 154 - DNA, 777 bp, Artificial Sequence
  Description of Artificial Sequence: Synthetic polynucleotide
caggttcagctgctggaatctggcggaggattggttcagcctggcggctctctgagactgtcttgtgctgcttctggcgtgcggatcagcacccaggatatgagctgggtccgacaggctcctggcaaaggactggaatgggtgtcctccatcctgacacctaacggctccacctactacgccgactccgtgaagggcagattcaccatctctcgggacaactccaagaacaccctgtacctgcagatgaactccctgagagccgaggacaccgccgtgtactattgtgctggcgtggacgagagatgcgaggccgaggatcagatcgattattggggccagggcaccctggtcaccgtctcgagcggcggaggatcccaagtgcagctgcaagagagcggaggcggaagcgtgcaagctggaggatctctgaggctgagctgcacagccagcggcttcactttcgatgacagcgacatgggctggtataggcaagcccccggcaatgagtgtgagctggtgagcacaatcagcagcgacggctccacttactacgccgacagcgtcaagggaaggttcacaatcagccaagataacgccaagaacactgtgtatctgcagatgaactctctgaagccagaggacacagccgtgtactactgtgctgccgagcctaggggctactatagcaactacggcggaaggagggagtgcaattactggggccaaggcacacaagtgacagtttcttctgctagccaccatcaccatcaccac

SEQ ID NO: 155 - DNA, 750 bp, Artificial Sequence
  Description of Artificial Sequence: Synthetic polynucleotide
caggttcagctgctggaatctggcggaggattggttcagcctggcggctctctgagactgtcttgtgctgcctctggcgacatgatcatctccgaggacatgagctgggtccgacaggctcctggcaaaggactggaatgggtgtccacaatcgcctccgacgacggctctacctactacgccgattccgtgaagggcagattcaccatcagccgggacaactccaagaacaccctgtacctgcagatgaactccctgagagccgaggacaccgccgtgtactattgtgccggcttcgatgcccaggatgccgccattgaatattggggccagggcaccctggtcaccgtctcgagcggcggaggatcccaagtgcagctgcaagagagcggaggaggcagcgtgcaagccggaggctctctgagactgagctgtgtggccagcggctacacaagctgcatgggctggtttaggcaagcccccggcaaggagagagaggccgtggccacaatctacactaggggaaggagcatctactacgccgacagcgtgaaaggaaggttcacaatcagccaagataacgccaagaacactctgtatctgcagatgaacagcctcaagccagaggacatcgccatgtatagctgtgctgctggcggctatagctggagcgctggctgcgagttcaattactggggccaaggcacacaagtgactgtttcttctgctagccaccatcaccatcaccac

SEQ ID NO: 156 - DNA, 777 bp, Artificial Sequence
  Description of Artificial Sequence: Synthetic polynucleotide
caggttcagctgcaagagtctggcggaggattggttcagcctggcggatctctgaagctgtcttgtgccgcctccggcttccggttctctaactacggaatgtcctgggtccgacaggctcctggcgaaggacttgagtgggtgtcctacatcaacggcgacggcagcagaacccactacgccgattctgtgaagggcagattcaccatcagccgggacaacgccaagaacaccctgtacctgcagctcaactccctgaaaaccgaggacaccgccatgtactactgcgagaagggcctgtccagagatggctggtcactgtctgctgcttctagaggccagggcacccaagtgacagtctcgagcggcggaggatcccaagtgcagctgcaagagagcggaggcggaagcgtgcaagctggaggatctctgaggctgagctgcacagccagcggcttcactttcgatgacagcgacatgggctggtataggcaagcccccggcaatgagtgtgagctggtgagcacaatcagcagcgacggctccacttactacgccgacagcgtcaagggaaggttcacaatcagccaagataacgccaagaacactgtgtatctgcagatgaactctctgaagccagaggacacagccgtgtactactgtgctgccgagcctaggggctactatagcaactacggcggaaggagggagtgcaattactggggccaaggcacacaagtgacagtttcttctgctagccaccatcaccatcaccac

SEQ ID NO: 157 - DNA, 762 bp, Artificial Sequence
  Description of Artificial Sequence: Synthetic polynucleotide
caggttcagctgcaagaatctggcggcggatctgttcagacaggcggctctctgagactgtcctgtgctgtgtccggctacaccacctacagcttcaactacatgggctggttcaggcaggcccctggcaaagaacgagaaggcgtggccgtgatctataccggcggaggctctaccctgtacgccgactctgtgaagggcagattcaccatcagccaggacaacgccaagaacaccgtgtacctgcagatgaactccctgaagcctgaggacaccgccatgtactactgtgccgccgacgaccagagattcgcctctcctctgtacgcctacttcggctattggggccagggcacccaagtgacagtctcgagcggcggaggatcccaagtgcagctgcaagagagcggaggaggactggtccagcccggcggctctctgaggctgagctgcactgcttccggcttcagcttcagcagctaccctatgacatgggctaggcaagcccccggcaaaggactggaatgggtgagcactattgccagcgatggaggcagcacagcctacgctgccagcgtggagggaaggttcacaatctctagggacaatgccaagagcacactgtatctgcagctgaactctctgaagacagaggacactgccatgtactactgcactaagggctacggcgatggcacaccagctcccggccaaggcacacaagtgactgtttcttctgctagccaccatcaccatcaccac

SEQ ID NO: 158 - DNA, 771 bp, Artificial Sequence
  Description of Artificial Sequence: Synthetic polynucleotide
caggttcagctgcaagaatctggcggcggatctgttcagacaggcggctctctgagactgtcctgtgctgtgtccggctacaccacctacagcttcaactacatgggctggttcaggcaggcccctggcaaagaacgagaaggcgtggccgtgatctataccggcggaggctctaccctgtacgccgactctgtgaagggcagattcaccatcagccaggacaacgccaagaacaccgtgtacctgcagatgaactccctgaagcctgaggacaccgccatgtactactgtgccgccgacgaccagagattcgcctctcctctgtacgcctacttcggctattggggccagggcacccaagtgacagtctcgagcggcggaggatcccaagtgcagctgcaagagagcggaggaggactggtgcagcccggcggctctctgaggctgagctgtgctgccagcggcttcactttcagcagcgctcacatgagctgggtgaggcaagcccccggcaaaggaagggagtggatcgcctccatctacagcggcggcggaacattctacgccgacagcgtgaagggaaggttcacaatctctagggacaacgccaagaacacactgtatctgcagctgaactctctgaaggccgaggacactgccatgtactactgcgccactaataggctgcactactacagcgacgatgattctctgaggggccaaggcacacaagtgacagtttcttctgctagccaccatcaccatcaccac

SEQ ID NO: 159 - DNA, 774 bp, Artificial Sequence
  Description of Artificial Sequence: Synthetic polynucleotide
caggttcagctgcaagaatctggcggcggatctgttcagacaggcggctctctgagactgtcctgtgctgtgtccggctacaccacctacagcttcaactacatgggctggttcaggcaggcccctggcaaagaacgagaaggcgtggccgtgatctataccggcggaggctctaccctgtacgccgactctgtgaagggcagattcaccatcagccaggacaacgccaagaacaccgtgtacctgcagatgaactccctgaagcctgaggacaccgccatgtactactgtgccgccgacgaccagagattcgcctctcctctgtacgcctacttcggctattggggccagggcacccaagtgacagtctcgagcggcggaggatcccaagtgcagctgcaagagagcggaggaggaagcgtgcaagccggcggatctctgagactcagctgtactgcctccggcttcacattcgacgatagggagatgaactggtataggcaagcccccggcaatgagtgcgagctggtgagcacaatctccagcgatggcagcacttactacgccgatagcgtgaagggaaggttcactatctcccaagataacgccaagaacacagtctatctgcagatggactccgtcaagccagaggatactgccgtgtactactgcgccgccgacttcatgatcgccatccaagcccccggcgctggctgttggggacaaggcactcaagtgacagtttcttctgctagccaccatcaccatcaccac

SEQ ID NO: 160 - DNA, 768 bp, Artificial Sequence
  Description of Artificial Sequence: Synthetic polynucleotide
caggttcagctgcaagaatctggcggcggatctgttcagacaggcggctctctgagactgtcctgtgctgtgtccggctacaccacctacagcttcaactacatgggctggttcaggcaggcccctggcaaagaacgagaaggcgtggccgtgatctataccggcggaggctctaccctgtacgccgactctgtgaagggcagattcaccatcagccaggacaacgccaagaacaccgtgtacctgcagatgaactccctgaagcctgaggacaccgccatgtactactgtgccgccgacgaccagagattcgcctctcctctgtacgcctacttcggctattggggccagggcacccaagtgacagtctcgagcggcggaggatcccaagtgcagctgcaagagagcggaggaggcagcgtgcaagccggaggctctctgagactgagctgtgtggccagcggctacacaagctgcatgggctggtttaggcaagcccccggcaaggagagagaggccgtggccacaatctacactaggggaaggagcatctactacgccgacagcgtgaaaggaaggttcacaatcagccaagataacgccaagaacactctgtatctgcagatgaacagcctcaagccagaggacatcgccatgtatagctgtgctgctggcggctatagctggagcgctggctgcgagttcaattactggggccaaggcacacaagtgactgtttcttctgctagccaccatcaccatcaccac

SEQ ID NO: 161 - DNA, 786 bp, Artificial Sequence
  Description of Artificial Sequence: Synthetic polynucleotide
caggttcagctgcaagaatctggcggcggatctgttcagacaggcggctctctgagactgtcctgtgctgtgtccggctacaccacctacagcttcaactacatgggctggttcaggcaggcccctggcaaagaacgagaaggcgtggccgtgatctataccggcggaggctctaccctgtacgccgactctgtgaagggcagattcaccatcagccaggacaacgccaagaacaccgtgtacctgcagatgaactccctgaagcctgaggacaccgccatgtactactgtgccgccgacgaccagagattcgcctctcctctgtacgcctacttcggctattggggccagggcacccaagtgacagtctcgagcggcggaggatcccaagtgcagctgcaagagagcggaggcggaagcgtgcaagctggaggatctctgaggctgagctgcacagccagcggcttcactttcgatgacagcgacatgggctggtataggcaagcccccggcaatgagtgtgagctggtgagcacaatcagcagcgacggctccacttactacgccgacagcgtcaagggaaggttcacaatcagccaagataacgccaagaacactgtgtatctgcagatgaactctctgaagccagaggacacagccgtgtactactgtgctgccgagcctaggggctactatagcaactacggcggaaggagggagtgcaattactggggccaaggcacacaagtgacagtttcttctgctagccaccatcaccatcaccac

SEQ ID NO: 162 - DNA, 792 bp, Artificial Sequence
  Description of Artificial Sequence: Synthetic polynucleotide
caggttcagctgcaagaatctggcggcggatctgttcagacaggcggctctctgagactgtcctgtgctgtgtccggctacaccacctacagcttcaactacatgggctggttcaggcaggcccctggcaaagaacgagaaggcgtggccgtgatctataccggcggaggctctaccctgtacgccgactctgtgaagggcagattcaccatcagccaggacaacgccaagaacaccgtgtacctgcagatgaactccctgaagcctgaggacaccgccatgtactactgtgccgccgacgaccagagattcgcctctcctctgtacgcctacttcggctattggggccagggcacccaagtgacagtctcgagcggcggaggatcccaagtgcagctgcaagagagcggaggaggaagcgtgcaagccggaggctctctgaggctgagctgtgtggccagcggctacactttcagcagctactgcatgggctggttcagacaagcccccggcaaggaaagggaaggagtggccgctctgggcggaggaagcacatactacgctgacagcgtgaagggaaggttcacaatcagccaagataacgccaagaacacactgtatctgcagatgaactctctgaagccagaggacacagccatgtactactgtgccgctgcttgggtcgcttgtctggagttcggcggcagctggtacgatctggctaggtacaagcactggggccaaggcacacaagtgacagtttcttctgctagccaccatcaccatcaccac

SEQ ID NO: 163 - DNA, 735 bp, Artificial Sequence
  Description of Artificial Sequence: Synthetic polynucleotide
caggttcagctgcaagagtctggcggaggattggttcagcctggcggatctctgagactgtcctgtgtggcctctggcttcaccttctccaactactggatcttctgggtccgacaggccgctggcaaaggactggaatggctgtccacctctaacaccggcggagacaccactaagtacgccgactctgtgaagggcagattcaccatctccagagacagcgccaagaacaccgagtacctgcagatgaactccctgaagcctgaggacaccgccgtgtactactgcgagacaggcagatgcgctagatccggcggctatcagggcacccaagtgacagtctcgagcggcggaggatcccaagtgcagctgcaagagagcggaggaggactggtccagcccggcggctctctgaggctgagctgcactgcttccggcttcagcttcagcagctaccctatgacatgggctaggcaagcccccggcaaaggactggaatgggtgagcactattgccagcgatggaggcagcacagcctacgctgccagcgtggagggaaggttcacaatctctagggacaatgccaagagcacactgtatctgcagctgaactctctgaagacagaggacactgccatgtactactgcactaagggctacggcgatggcacaccagctcccggccaaggcacacaagtgactgtttcttctgctagccaccatcaccatcaccac

SEQ ID NO: 164 - DNA, 747 bp, Artificial Sequence
  Description of Artificial Sequence: Synthetic polynucleotide
caggttcagctgcaagagtctggcggaggattggttcagcctggcggatctctgagactgtcctgtgtggcctctggcttcaccttctccaactactggatcttctgggtccgacaggccgctggcaaaggactggaatggctgtccacctctaacaccggcggagacaccactaagtacgccgactctgtgaagggcagattcaccatctccagagacagcgccaagaacaccgagtacctgcagatgaactccctgaagcctgaggacaccgccgtgtactactgcgagacaggcagatgcgctagatccggcggctatcagggcacccaagtgacagtctcgagcggcggaggatcccaagtgcagctgcaagagagcggaggaggaagcgtgcaagccggcggatctctgagactcagctgtactgcctccggcttcacattcgacgatagggagatgaactggtataggcaagcccccggcaatgagtgcgagctggtgagcacaatctccagcgatggcagcacttactacgccgatagcgtgaagggaaggttcactatctcccaagataacgccaagaacacagtctatctgcagatggactccgtcaagccagaggatactgccgtgtactactgcgccgccgacttcatgatcgccatccaagcccccggcgctggctgttggggacaaggcactcaagtgacagtttcttctgctagccaccatcaccatcaccac

SEQ ID NO: 165 - DNA, 774 bp, Artificial Sequence
  Description of Artificial Sequence: Synthetic polynucleotide
caggttcagctgcaagaatctggcggaggctctgtgcaagtcggcggatctctgaagctgtcttgtgccgcctccggctacacctactccagctactactgcatgggctggttcagacaggcccctggcaaagagagagaaggcgtcgccgccatcgactctgatggctctacctcttacgccgactccgtgaagggcagattcaccatctctcaggacgacgccaagaacaccctgtacctgcagatgaactccctgaagcctgaggacaccgccatgtactactgcgccgcttcttacgaggtggtggactgctacccttctggctacggccaggattattggggcaagggcacccaagtgaccgtctcgagcggcggaggatcccaagtgcagctgcaagagagcggaggaggaagcgtgcaagccggcggatctctgagactcagctgtactgcctccggcttcacattcgacgatagggagatgaactggtataggcaagcccccggcaatgagtgcgagctggtgagcacaatctccagcgatggcagcacttactacgccgatagcgtgaagggaaggttcactatctcccaagataacgccaagaacacagtctatctgcagatggactccgtcaagccagaggatactgccgtgtactactgcgccgccgacttcatgatcgccatccaagcccccggcgctggctgttggggacaaggcactcaagtgacagtttcttctgctagccaccatcaccatcaccac

SEQ ID NO: 166 - DNA, 759 bp, Artificial Sequence
  Description of Artificial Sequence: Synthetic polynucleotide
caggttcagctgcaagaatctggcggcggatctgttcaggctggcggatctctgagactgtcttgtgccgcctccgagtacaccgcctccagatactgtatggcctggttcagacaggcccctggcaaagagagagaaggcgtcgccgctattcatcctggcggaggcaccacctactacgccgattctgtgaagggcagattctccatcagccaggactccgccgacaacaccctgtacctgcagatgaactccctgaagcctgaggacaccgccatgtactactgtgccgctggatctctgtgggtgcccttcggcgatagatgtgccgctaattattggggccagggcacacaagtgaccgtctcgagcggcggaggatcccaagtgcagctgcaagagagcggaggaggactggtccagcccggcggctctctgaggctgagctgcactgcttccggcttcagcttcagcagctaccctatgacatgggctaggcaagcccccggcaaaggactggaatgggtgagcactattgccagcgatggaggcagcacagcctacgctgccagcgtggagggaaggttcacaatctctagggacaatgccaagagcacactgtatctgcagctgaactctctgaagacagaggacactgccatgtactactgcactaagggctacggcgatggcacaccagctcccggccaaggcacacaagtgactgtttcttctgctagccaccatcaccatcaccac

SEQ ID NO: 167 - DNA, 768 bp, Artificial Sequence
  Description of Artificial Sequence: Synthetic polynucleotide
caggttcagctgcaagaatctggcggcggatctgttcaggctggcggatctctgagactgtcttgtgccgcctccgagtacaccgcctccagatactgtatggcctggttcagacaggcccctggcaaagagagagaaggcgtcgccgctattcatcctggcggaggcaccacctactacgccgattctgtgaagggcagattctccatcagccaggactccgccgacaacaccctgtacctgcagatgaactccctgaagcctgaggacaccgccatgtactactgtgccgctggatctctgtgggtgcccttcggcgatagatgtgccgctaattattggggccagggcacacaagtgaccgtctcgagcggcggaggatcccaagtgcagctgcaagagagcggaggaggactggtgcagcccggcggctctctgaggctgagctgtgctgccagcggcttcactttcagcagcgctcacatgagctgggtgaggcaagcccccggcaaaggaagggagtggatcgcctccatctacagcggcggcggaacattctacgccgacagcgtgaagggaaggttcacaatctctagggacaacgccaagaacacactgtatctgcagctgaactctctgaaggccgaggacactgccatgtactactgcgccactaataggctgcactactacagcgacgatgattctctgaggggccaaggcacacaagtgacagtttcttctgctagccaccatcaccatcaccac

SEQ ID NO: 168 - DNA, 783 bp, Artificial Sequence
  Description of Artificial Sequence: Synthetic polynucleotide
caggttcagctgcaagaatctggcggcggatctgttcaggctggcggatctctgagactgtcttgtgccgcctccgagtacaccgcctccagatactgtatggcctggttcagacaggcccctggcaaagagagagaaggcgtcgccgctattcatcctggcggaggcaccacctactacgccgattctgtgaagggcagattctccatcagccaggactccgccgacaacaccctgtacctgcagatgaactccctgaagcctgaggacaccgccatgtactactgtgccgctggatctctgtgggtgcccttcggcgatagatgtgccgctaattattggggccagggcacacaagtgaccgtctcgagcggcggaggatcccaagtgcagctgcaagagagcggaggcggaagcgtgcaagctggaggatctctgaggctgagctgcacagccagcggcttcactttcgatgacagcgacatgggctggtataggcaagcccccggcaatgagtgtgagctggtgagcacaatcagcagcgacggctccacttactacgccgacagcgtcaagggaaggttcacaatcagccaagataacgccaagaacactgtgtatctgcagatgaactctctgaagccagaggacacagccgtgtactactgtgctgccgagcctaggggctactatagcaactacggcggaaggagggagtgcaattactggggccaaggcacacaagtgacagtttcttctgctagccaccatcaccatcaccac

SEQ ID NO: 169 - DNA, 762 bp, Artificial Sequence
  Description of Artificial Sequence: Synthetic polynucleotide
caggttcagctgcaagaatctggcggcggatctgttcaggctggcggatctctgagactgtcttgtgccgcttccggctacgagtactgcagaatccacatgacctggtacagacaaggccctggcaaagagagagagttcgtcagctccatcggctccgacggcagaaagacctacgccaattctgtgaccggcagattcaccatcagccgggacaacgccaaccacaccgtgtacctgcagatgaactccctgtctcctgaggacaccgccatgtactactgcaagaccgagtacctgtacggcctgggctgtcctgatggctctgcttattggggccagggcacccaagtgaccgtctcgagcggcggaggatcccaagtgcagctgcaagagagcggaggaggactggtgcagcccggcggctctctgaggctgagctgtgctgccagcggcttcactttcagcagcgctcacatgagctgggtgaggcaagcccccggcaaaggaagggagtggatcgcctccatctacagcggcggcggaacattctacgccgacagcgtgaagggaaggttcacaatctctagggacaacgccaagaacacactgtatctgcagctgaactctctgaaggccgaggacactgccatgtactactgcgccactaataggctgcactactacagcgacgatgattctctgaggggccaaggcacacaagtgacagtttcttctgctagccaccatcaccatcaccac

SEQ ID NO: 170 - protein, 251 aa, Artificial Sequence
  Description of Artificial Sequence: Synthetic polypeptide
QVQLQESGGGLVQPGGSLRLSCTASGFSFSSYPMTWARQAPGKGLEWVSTIASDGGSTAYAASVEGRFTISRDNAKSTLYLQLNSLKTEDTAMYYCTKGYGDGTPAPGQGTQVTVSSGGGSQVQLLESGGGLVQPGGSLRLSCAASGVRISTQDMSWVRQAPGKGLEWVSSILTPNGSTYYADSVKGRFTISRDNSKNTLYLQMNSLRAEDTAVYYCAGVDERCEAEDQIDYWGQGTLVTVSSASHHHHHH

SEQ ID NO: 171 - protein, 248 aa, Artificial Sequence
  Description of Artificial Sequence: Synthetic polypeptide
QVQLQESGGGLVQPGGSLRLSCTASGFSFSSYPMTWARQAPGKGLEWVSTIASDGGSTAYAASVEGRFTISRDNAKSTLYLQLNSLKTEDTAMYYCTKGYGDGTPAPGQGTQVTVSSGGGSQVQLLESGGGLVQPGGSLRLSCAASGDMIISEDMSWVRQAPGKGLEWVSTIASDDGSTYYADSVKGRFTISRDNSKNTLYLQMNSLRAEDTAVYYCAGFDAQDAAIEYWGQGTLVTVSSASHHHHHH

SEQ ID NO: 172 - protein, 248 aa, Artificial Sequence; identical to SEQ ID NO: 81
  Description of Artificial Sequence: Synthetic polypeptide

SEQ ID NO: 173 - protein, 251 aa, Artificial Sequence; identical to SEQ ID NO: 82
  Description of Artificial Sequence: Synthetic polypeptide

SEQ ID NO: 174 - protein, 254 aa, Artificial Sequence; identical to SEQ ID NO: 83
  Description of Artificial Sequence: Synthetic polypeptide

SEQ ID NO: 175 - protein, 245 aa, Artificial Sequence
  Description of Artificial Sequence: Synthetic polypeptide
QVQLQESGGGLVQPGGSLRLSCTASGFSFSSYPMTWARQAPGKGLEWVSTIASDGGSTAYAASVEGRFTISRDNAKSTLYLQLNSLKTEDTAMYYCTKGYGDGTPAPGQGTQVTVSSGGGSQVQLQESGGGLVQPGGSLRLSCVASGFTFSNYWIFWVRQAAGKGLEWLSTSNTGGDTTKYADSVKGRFTISRDSAKNTEYLQMNSLKPEDTAVYYCETGRCARSGGYQGTQVTVSSASHHHHHH

SEQ ID NO: 176 - protein, 253 aa, Artificial Sequence; identical to SEQ ID NO: 84
  Description of Artificial Sequence: Synthetic polypeptide

SEQ ID NO: 177 - protein, 254 aa, Artificial Sequence; identical to SEQ ID NO: 85
  Description of Artificial Sequence: Synthetic polypeptide

SEQ ID NO: 178 - protein, 253 aa, Artificial Sequence
  Description of Artificial Sequence: Synthetic polypeptide
QVQLQESGGGLVQPGGSLRLSCTASGFSFSSYPMTWARQAPGKGLEWVSTIASDGGSTAYAASVEGRFTISRDNAKSTLYLQLNSLKTEDTAMYYCTKGYGDGTPAPGQGTQVTVSSGGGSQVQLQESGGGSVQAGGSLRLSCAASEYTASRYCMAWFRQAPGKEREGVAAIHPGGGTTYYADSVKGRFSISQDSADNTLYLQMNSLKPEDTAMYYCAAGSLWVPFGDRCAANYWGQGTQVTVSSASHHHHHH

SEQ ID NO: 179 - protein, 251 aa, Artificial Sequence
  Description of Artificial Sequence: Synthetic polypeptide
QVQLQESGGGLVQPGGSLRLSCTASGFSFSSYPMTWARQAPGKGLEWVSTIASDGGSTAYAASVEGRFTISRDNAKSTLYLQLNSLKTEDTAMYYCTKGYGDGTPAPGQGTQVTVSSGGGSQVQLQESGGGSVQAGGSLRLSCAASGYEYCRIHMTWYRQGPGKEREFVSSIGSDGRKTYANSVTGRFTISRDNANHTVYLQMNSLSPEDTAMYYCKTEYLYGLGCPDGSAYWGQGTQVTVSSASHHHHHH

SEQ ID NO: 180 - protein, 254 aa, Artificial Sequence; identical to SEQ ID NO: 86
  Description of Artificial Sequence: Synthetic polypeptide

SEQ ID NO: 181 - protein, 251 aa, Artificial Sequence; identical to SEQ ID NO: 87
  Description of Artificial Sequence: Synthetic polypeptide

SEQ ID NO: 182 - protein, 251 aa, Artificial Sequence; identical to SEQ ID NO: 88
  Description of Artificial Sequence: Synthetic polypeptide

SEQ ID NO: 183 - protein, 254 aa, Artificial Sequence; identical to SEQ ID NO: 89
  Description of Artificial Sequence: Synthetic polypeptide

SEQ ID NO: 184 - protein, 257 aa, Artificial Sequence
  Description of Artificial Sequence: Synthetic polypeptide
QVQLQESGGGLVQPGGSLRLSCAASGFTFSSAHMSWVRQAPGKGREWIASIYSGGGTFYADSVKGRFTISRDNAKNTLYLQLNSLKAEDTAMYYCATNRLHYYSDDDSLRGQGTQVTVSSGGGSQVQLQESGGGSVQTGGSLRLSCAVSGYTTYSFNYMGWFRQAPGKEREGVAVIYTGGGSTLYADSVKGRFTISQDNAKNTVYLQMNSLKPEDTAMYYCAADDQRFASPLYAYFGYWGQGTQVTVSSASHHHHHH

SEQ ID NO: 185 - protein, 248 aa, Artificial Sequence; identical to SEQ ID NO: 90
  Description of Artificial Sequence: Synthetic polypeptide

SEQ ID NO: 186 - protein, 256 aa, Artificial Sequence; identical to SEQ ID NO: 91
  Description of Artificial Sequence: Synthetic polypeptide

SEQ ID NO: 187 - protein, 257 aa, Artificial Sequence
  Description of Artificial Sequence: Synthetic polypeptide
QVQLQESGGGLVQPGGSLRLSCAASGFTFSSAHMSWVRQAPGKGREWIASIYSGGGTFYADSVKGRFTISRDNAKNTLYLQLNSLKAEDTAMYYCATNRLHYYSDDDSLRGQGTQVTVSSGGGSQVQLQESGGGSVQVGGSLKLSCAASGYTYSSYYCMGWFRQAPGKEREGVAAIDSDGSTSYADSVKGRFTISQDDAKNTLYLQMNSLKPEDTAMYYCAASYEVVDCYPSGYGQDYWGKGTQVTVSSASHHHHHH

SEQ ID NO: 188 - protein, 256 aa, Artificial Sequence
  Description of Artificial Sequence: Synthetic polypeptide
QVQLQESGGGLVQPGGSLRLSCAASGFTFSSAHMSWVRQAPGKGREWIASIYSGGGTFYADSVKGRFTISRDNAKNTLYLQLNSLKAEDTAMYYCATNRLHYYSDDDSLRGQGTQVTVSSGGGSQVQLQESGGGSVQAGGSLRLSCAASEYTASRYCMAWFRQAPGKEREGVAAIHPGGGTTYYADSVKGRFSISQDSADNTLYLQMNSLKPEDTAMYYCAAGSLWVPFGDRCAANYWGQGTQVTVSSASHHHHHH

SEQ ID NO: 189 - protein, 254 aa, Artificial Sequence
  Description of Artificial Sequence: Synthetic polypeptide
QVQLQESGGGLVQPGGSLRLSCAASGFTFSSAHMSWVRQAPGKGREWIASIYSGGGTFYADSVKGRFTISRDNAKNTLYLQLNSLKAEDTAMYYCATNRLHYYSDDDSLRGQGTQVTVSSGGGSQVQLQESGGGSVQAGGSLRLSCAASGYEYCRIHMTWYRQGPGKEREFVSSIGSDGRKTYANSVTGRFTISRDNANHTVYLQMNSLSPEDTAMYYCKTEYLYGLGCPDGSAYWGQGTQVTVSSASHHHHHH

SEQ ID NO: 190 - protein, 255 aa, Artificial Sequence; identical to SEQ ID NO: 92
  Description of Artificial Sequence: Synthetic polypeptide

SEQ ID NO: 191 - protein, 252 aa, Artificial Sequence
  Description of Artificial Sequence: Synthetic polypeptide
QVQLQESGGGSVQAGGSLRLSCTASGFTFDDREMNWYRQAPGNECELVSTISSDGSTYYADSVKGRFTISQDNAKNTVYLQMDSVKPEDTAVYYCAADFMIAIQAPGAGCWGQGTQVTVSSGGGSQVQLLESGGGLVQPGGSLRLSCAASGDMIISEDMSWVRQAPGKGLEWVSTIASDDGSTYYADSVKGRFTISRDNSKNTLYLQMNSLRAEDTAVYYCAGFDAQDAAIEYWGQGTLVTVSSASHHHHHH

SEQ ID NO: 192 - protein, 252 aa, Artificial Sequence
  Description of Artificial Sequence: Synthetic polypeptide
QVQLQESGGGSVQAGGSLRLSCTASGFTFDDREMNWYRQAPGNECELVSTISSDGSTYYADSVKGRFTISQDNAKNTVYLQMDSVKPEDTAVYYCAADFMIAIQAPGAGCWGQGTQVTVSSGGGSQVQLQESGGGSVQAGGSLRLSCVGSGYTYDTSDMSWYRQAPGKEREFVSDIDSGDWAAYADAVKGRFTISRDNAKKTVYLQMNSLEPEDTAMYYCKASYWKWGKLNNFWGPGTQVTVSSASHHHHHH

SEQ ID NO: 193 - protein, 255 aa, Artificial Sequence; identical to SEQ ID NO: 93
  Description of Artificial Sequence: Synthetic polypeptide

SEQ ID NO: 194 - protein, 258 aa, Artificial Sequence; identical to SEQ ID NO: 94
  Description of Artificial Sequence: Synthetic polypeptide

SEQ ID NO: 195 - protein, 249 aa, Artificial Sequence
  Description of Artificial Sequence: Synthetic polypeptide
QVQLQESGGGSVQAGGSLRLSCTASGFTFDDREMNWYRQAPGNECELVSTISSDGSTYYADSVKGRFTISQDNAKNTVYLQMDSVKPEDTAVYYCAADFMIAIQAPGAGCWGQGTQVTVSSGGGSQVQLQESGGGLVQPGGSLRLSCVASGFTFSNYWIFWVRQAAGKGLEWLSTSNTGGDTTKYADSVKGRFTISRDSAKNTEYLQMNSLKPEDTAVYYCETGRCARSGGYQGTQVTVSSASHHHHHH

SEQ ID NO: 196 - protein, 257 aa, Artificial Sequence
  Description of Artificial Sequence: Synthetic polypeptide
QVQLQESGGGSVQAGGSLRLSCTASGFTFDDREMNWYRQAPGNECELVSTISSDGSTYYADSVKGRFTISQDNAKNTVYLQMDSVKPEDTAVYYCAADFMIAIQAPGAGCWGQGTQVTVSSGGGSQVQLQESGGGSVQVGGSLRLSCATSGDTKSIRCMGWFRQTPGKEREGIAAIDREGFATYADSVYDRFTIAQDNAQNTLYLEMNALKPEDTAMYYCAAQNMCRVVRGAMTGVDYWGKGTQVTVSSASHHHHHH

SEQ ID NO: 197 - protein, 258 aa, Artificial Sequence
  Description of Artificial Sequence: Synthetic polypeptide
QVQLQESGGGSVQAGGSLRLSCTASGFTFDDREMNWYRQAPGNECELVSTISSDGSTYYADSVKGRFTISQDNAKNTVYLQMDSVKPEDTAVYYCAADFMIAIQAPGAGCWGQGTQVTVSSGGGSQVQLQESGGGSVQVGGSLKLSCAASGYTYSSYYCMGWFRQAPGKEREGVAAIDSDGSTSYADSVKGRFTISQDDAKNTLYLQMNSLKPEDTAMYYCAASYEVVDCYPSGYGQDYWGKGTQVTVSSASHHHHHH

SEQ ID NO: 198 - protein, 257 aa, Artificial Sequence
  Description of Artificial Sequence: Synthetic polypeptide
QVQLQESGGGSVQAGGSLRLSCTASGFTFDDREMNWYRQAPGNECELVSTISSDGSTYYADSVKGRFTISQDNAKNTVYLQMDSVKPEDTAVYYCAADFMIAIQAPGAGCWGQGTQVTVSSGGGSQVQLQESGGGSVQAGGSLRLSCAASEYTASRYCMAWFRQAPGKEREGVAAIHPGGGTTYYADSVKGRFSISQDSADNTLYLQMNSLKPEDTAMYYCAAGSLWVPFGDRCAANYWGQGTQVTVSSASHHHHHH

SEQ ID NO: 199 - protein, 255 aa, Artificial Sequence
  Description of Artificial Sequence: Synthetic polypeptide
QVQLQESGGGSVQAGGSLRLSCTASGFTFDDREMNWYRQAPGNECELVSTISSDGSTYYADSVKGRFTISQDNAKNTVYLQMDSVKPEDTAVYYCAADFMIAIQAPGAGCWGQGTQVTVSSGGGSQVQLQESGGGSVQAGGSLRLSCAASGYEYCRIHMTWYRQGPGKEREFVSSIGSDGRKTYANSVTGRFTISRDNANHTVYLQMNSLSPEDTAMYYCKTEYLYGLGCPDGSAYWGQGTQVTVSSASHHHHHH

SEQ ID NO: 200 - protein, 253 aa, Artificial Sequence
  Description of Artificial Sequence: Synthetic polypeptide
QVQLQESGGGSVQAGGSLRLSCVASGYTSCMGWFRQAPGKEREAVATIYTRGRSIYYADSVKGRFTISQDNAKNTLYLQMNSLKPEDIAMYSCAAGGYSWSAGCEFNYWGQGTQVTVSSGGGSQVQLLESGGGLVQPGGSLRLSCAASGVRISTQDMSWVRQAPGKGLEWVSSILTPNGSTYYADSVKGRFTISRDNSKNTLYLQMNSLRAEDTAVYYCAGVDERCEAEDQIDYWGQGTLVTVSSASHHHHHH

SEQ ID NO: 201 - protein, 250 aa, Artificial Sequence
  Description of Artificial Sequence: Synthetic polypeptide
QVQLQESGGGSVQAGGSLRLSCVASGYTSCMGWFRQAPGKEREAVATIYTRGRSIYYADSVKGRFTISQDNAKNTLYLQMNSLKPEDIAMYSCAAGGYSWSAGCEFNYWGQGTQVTVSSGGGSQVQLLESGGGLVQPGGSLRLSCAASGDMIISEDMSWVRQAPGKGLEWVSTIASDDGSTYYADSVKGRFTISRDNSKNTLYLQMNSLRAEDTAVYYCAGFDAQDAAIEYWGQGTLVTVSSASHHHHHH

SEQ ID NO: 202 - protein, 250 aa, Artificial Sequence
  Description of Artificial Sequence: Synthetic polypeptide
QVQLQESGGGSVQAGGSLRLSCVASGYTSCMGWFRQAPGKEREAVATIYTRGRSIYYADSVKGRFTISQDNAKNTLYLQMNSLKPEDIAMYSCAAGGYSWSAGCEFNYWGQGTQVTVSSGGGSQVQLQESGGGSVQAGGSLRLSCVGSGYTYDTSDMSWYRQAPGKEREFVSDIDSGDWAAYADAVKGRFTISRDNAKKTVYLQMNSLEPEDTAMYYCKASYWKWGKLNNFWGPGTQVTVSSASHHHHHH

SEQ ID NO: 203 - protein, 253 aa, Artificial Sequence
  Description of Artificial Sequence: Synthetic polypeptide
QVQLQESGGGSVQAGGSLRLSCVASGYTSCMGWFRQAPGKEREAVATIYTRGRSIYYADSVKGRFTISQDNAKNTLYLQMNSLKPEDIAMYSCAAGGYSWSAGCEFNYWGQGTQVTVSSGGGSQVQLQESGGGLVQPGGSLKLSCAASGFRFSNYGMSWVRQAPGEGLEWVSYINGDGSRTHYADSVKGRFTISRDNAKNTLYLQLNSLKTEDTAMYYCEKGLSRDGWSLSAASRGQGTQVTVSSASHHHHHH

SEQ ID NO: 204 - protein, 256 aa, Artificial Sequence
  Description of Artificial Sequence: Synthetic polypeptide
QVQLQESGGGSVQAGGSLRLSCVASGYTSCMGWFRQAPGKEREAVATIYTRGRSIYYADSVKGRFTISQDNAKNTLYLQMNSLKPEDIAMYSCAAGGYSWSAGCEFNYWGQGTQVTVSSGGGSQVQLQESGGGSVQTGGSLRLSCAVSGYTTYSFNYMGWFRQAPGKEREGVAVIYTGGGSTLYADSVKGRFTISQDNAKNTVYLQMNSLKPEDTAMYYCAADDQRFASPLYAYFGYWGQGTQVTVSSASHHHHHH

SEQ ID NO: 205 - protein, 247 aa, Artificial Sequence
  Description of Artificial Sequence: Synthetic polypeptide
QVQLQESGGGSVQAGGSLRLSCVASGYTSCMGWFRQAPGKEREAVATIYTRGRSIYYADSVKGRFTISQDNAKNTLYLQMNSLKPEDIAMYSCAAGGYSWSAGCEFNYWGQGTQVTVSSGGGSQVQLQESGGGLVQPGGSLRLSCVASGFTFSNYWIFWVRQAAGKGLEWLSTSNTGGDTTKYADSVKGRFTISRDSAKNTEYLQMNSLKPEDTAVYYCETGRCARSGGYQGTQVTVSSASHHHHHH

SEQ ID NO: 206 - protein, 255 aa, Artificial Sequence
  Description of Artificial Sequence: Synthetic polypeptide
QVQLQESGGGSVQAGGSLRLSCVASGYTSCMGWFRQAPGKEREAVATIYTRGRSIYYADSVKGRFTISQDNAKNTLYLQMNSLKPEDIAMYSCAAGGYSWSAGCEFNYWGQGTQVTVSSGGGSQVQLQESGGGSVQVGGSLRLSCATSGDTKSIRCMGWFRQTPGKEREGIAAIDREGFATYADSVYDRFTIAQDNAQNTLYLEMNALKPEDTAMYYCAAQNMCRVVRGAMTGVDYWGKGTQVTVSSASHHHHHH

SEQ ID NO: 207 - protein, 256 aa, Artificial Sequence
  Description of Artificial Sequence: Synthetic polypeptide
QVQLQESGGGSVQAGGSLRLSCVASGYTSCMGWFRQAPGKEREAVATIYTRGRSIYYADSVKGRFTISQDNAKNTLYLQMNSLKPEDIAMYSCAAGGYSWSAGCEFNYWGQGTQVTVSSGGGSQVQLQESGGGSVQVGGSLKLSCAASGYTYSSYYCMGWFRQAPGKEREGVAAIDSDGSTSYADSVKGRFTISQDDAKNTLYLQMNSLKPEDTAMYYCAASYEVVDCYPSGYGQDYWGKGTQVTVSSASHHHHHH

SEQ ID NO: 208 - protein, 255 aa, Artificial Sequence
  Description of Artificial Sequence: Synthetic polypeptide
QVQLQESGGGSVQAGGSLRLSCVASGYTSCMGWFRQAPGKEREAVATIYTRGRSIYYADSVKGRFTISQDNAKNTLYLQMNSLKPEDIAMYSCAAGGYSWSAGCEFNYWGQGTQVTVSSGGGSQVQLQESGGGSVQAGGSLRLSCAASEYTASRYCMAWFRQAPGKEREGVAAIHPGGGTTYYADSVKGRFSISQDSADNTLYLQMNSLKPEDTAMYYCAAGSLWVPFGDRCAANYWGQGTQVTVSSASHHHHHH

SEQ ID NO: 209 - protein, 253 aa, Artificial Sequence; identical to SEQ ID NO: 95
  Description of Artificial Sequence: Synthetic polypeptide

SEQ ID NO: 210 - protein, 259 aa, Artificial Sequence; identical to SEQ ID NO: 96
  Description of Artificial Sequence: Synthetic polypeptide

SEQ ID NO: 211 - protein, 256 aa, Artificial Sequence; identical to SEQ ID NO: 97
  Description of Artificial Sequence: Synthetic polypeptide

SEQ ID NO: 212 - protein, 256 aa, Artificial Sequence; identical to SEQ ID NO: 98
  Description of Artificial Sequence: Synthetic polypeptide

SEQ ID NO: 213 - protein, 259 aa, Artificial Sequence; identical to SEQ ID NO: 99
  Description of Artificial Sequence: Synthetic polypeptide

SEQ ID NO: 214 - protein, 262 aa, Artificial Sequence; identical to SEQ ID NO: 100
  Description of Artificial Sequence: Synthetic polypeptide

SEQ ID NO: 215 - protein, 253 aa, Artificial Sequence
  Description of Artificial Sequence: Synthetic polypeptide
QVQLQESGGGSVQAGGSLRLSCTASGFTFDDSDMGWYRQAPGNECELVSTISSDGSTYYADSVKGRFTISQDNAKNTVYLQMNSLKPEDTAVYYCAAEPRGYYSNYGGRRECNYWGQGTQVTVSSGGGSQVQLQESGGGLVQPGGSLRLSCVASGFTFSNYWIFWVRQAAGKGLEWLSTSNTGGDTTKYADSVKGRFTISRDSAKNTEYLQMNSLKPEDTAVYYCETGRCARSGGYQGTQVTVSSASHHHHHH

SEQ ID NO: 216 - protein, 261 aa, Artificial Sequence; identical to SEQ ID NO: 101
  Description of Artificial Sequence: Synthetic polypeptide

SEQ ID NO: 217 - protein, 262 aa, Artificial Sequence; identical to SEQ ID NO: 102
  Description of Artificial Sequence: Synthetic polypeptide

SEQ ID NO: 218 - protein, 261 aa, Artificial Sequence; identical to SEQ ID NO: 103
  Description of Artificial Sequence: Synthetic polypeptide

SEQ ID NO: 219 - protein, 259 aa, Artificial Sequence; identical to SEQ ID NO: 104
  Description of Artificial Sequence: Synthetic polypeptide

SEQ ID NO: 220 - protein, 261 aa, Artificial Sequence; identical to SEQ ID NO: 105
  Description of Artificial Sequence: Synthetic polypeptide

SEQ ID NO: 221 - protein, 258 aa, Artificial Sequence
  Description of Artificial Sequence: Synthetic polypeptide
QVQLQESGGGSVQAGGSLRLSCVASGYTFSSYCMGWFRQAPGKEREGVAALGGGSTYYADSVKGRFTISQDNAKNTLYLQMNSLKPEDTAMYYCAAAWVACLEFGGSWYDLARYKHWGQGTQVTVSSGGGSQVQLLESGGGLVQPGGSLRLSCAASGDMIISEDMSWVRQAPGKGLEWVSTIASDDGSTYYADSVKGRFTISRDNSKNTLYLQMNSLRAEDTAVYYCAGFDAQDAAIEYWGQGTLVTVSSASHHHHHH

SEQ ID NO: 222 - protein, 258 aa, Artificial Sequence
  Description of Artificial Sequence: Synthetic polypeptide
QVQLQESGGGSVQAGGSLRLSCVASGYTFSSYCMGWFRQAPGKEREGVAALGGGSTYYADSVKGRFTISQDNAKNTLYLQMNSLKPEDTAMYYCAAAWVACLEFGGSWYDLARYKHWGQGTQVTVSSGGGSQVQLQESGGGSVQAGGSLRLSCVGSGYTYDTSDMSWYRQAPGKEREFVSDIDSGDWAAYADAVKGRFTISRDNAKKTVYLQMNSLEPEDTAMYYCKASYWKWGKLNNFWGPGTQVTVSSASHHHHHH

SEQ ID NO: 223 - protein, 261 aa, Artificial Sequence
  Description of Artificial Sequence: Synthetic polypeptide
QVQLQESGGGSVQAGGSLRLSCVASGYTFSSYCMGWFRQAPGKEREGVAALGGGSTYYADSVKGRFTISQDNAKNTLYLQMNSLKPEDTAMYYCAAAWVACLEFGGSWYDLARYKHWGQGTQVTVSSGGGSQVQLQESGGGLVQPGGSLKLSCAASGFRFSNYGMSWVRQAPGEGLEWVSYINGDGSRTHYADSVKGRFTISRDNAKNTLYLQLNSLKTEDTAMYYCEKGLSRDGWSLSAASRGQGTQVTVSSASHHHHHH

SEQ ID NO: 224 - protein, 264 aa, Artificial Sequence
  Description of Artificial Sequence: Synthetic polypeptide
QVQLQESGGGSVQAGGSLRLSCVASGYTFSSYCMGWFRQAPGKEREGVAALGGGSTYYADSVKGRFTISQDNAKNTLYLQMNSLKPEDTAMYYCAAAWVACLEFGGSWYDLARYKHWGQGTQVTVSSGGGSQVQLQESGGGSVQTGGSLRLSCAVSGYTTYSFNYMGWFRQAPGKEREGVAVIYTGGGSTLYADSVKGRFTISQDNAKNTVYLQMNSLKPEDTAMYYCAADDQRFASPLYAYFGYWGQGTQVTVSSASHHHHHH

SEQ ID NO: 225 - protein, 255 aa, Artificial Sequence
  Description of Artificial Sequence: Synthetic polypeptide
QVQLQESGGGSVQAGGSLRLSCVASGYTFSSYCMGWFRQAPGKEREGVAALGGGSTYYADSVKGRFTISQDNAKNTLYLQMNSLKPEDTAMYYCAAAWVACLEFGGSWYDLARYKHWGQGTQVTVSSGGGSQVQLQESGGGLVQPGGSLRLSCVASGFTFSNYWIFWVRQAAGKGLEWLSTSNTGGDTTKYADSVKGRFTISRDSAKNTEYLQMNSLKPEDTAVYYCETGRCARSGGYQGTQVTVSSASHHHHHH

SEQ ID NO: 226 - protein, 263 aa, Artificial Sequence; identical to SEQ ID NO: 106
  Description of Artificial Sequence: Synthetic polypeptide

SEQ ID NO: 227 - protein, 264 aa, Artificial Sequence
  Description of Artificial Sequence: Synthetic polypeptide
QVQLQESGGGSVQAGGSLRLSCVASGYTFSSYCMGWFRQAPGKEREGVAALGGGSTYYADSVKGRFTISQDNAKNTLYLQMNSLKPEDTAMYYCAAAWVACLEFGGSWYDLARYKHWGQGTQVTVSSGGGSQVQLQESGGGSVQVGGSLKLSCAASGYTYSSYYCMGWFRQAPGKEREGVAAIDSDGSTSYADSVKGRFTISQDDAKNTLYLQMNSLKPEDTAMYYCAASYEVVDCYPSGYGQDYWGKGTQVTVSSASHHHHHH

SEQ ID NO: 228 - protein, 263 aa, Artificial Sequence
  Description of Artificial Sequence: Synthetic polypeptide
QVQLQESGGGSVQAGGSLRLSCVASGYTFSSYCMGWFRQAPGKEREGVAALGGGSTYYADSVKGRFTISQDNAKNTLYLQMNSLKPEDTAMYYCAAAWVACLEFGGSWYDLARYKHWGQGTQVTVSSGGGSQVQLQESGGGSVQAGGSLRLSCAASEYTASRYCMAWFRQAPGKEREGVAAIHPGGGTTYYADSVKGRFSISQDSADNTLYLQMNSLKPEDTAMYYCAAGSLWVPFGDRCAANYWGQGTQVTVSSASHHHHHH

SEQ ID NO: 229 - protein, 261 aa, Artificial Sequence
  Description of Artificial Sequence: Synthetic polypeptide
QVQLQESGGGSVQAGGSLRLSCVASGYTFSSYCMGWFRQAPGKEREGVAALGGGSTYYADSVKGRFTISQDNAKNTLYLQMNSLKPEDTAMYYCAAAWVACLEFGGSWYDLARYKHWGQGTQVTVSSGGGSQVQLQESGGGSVQAGGSLRLSCAASGYEYCRIHMTWYRQGPGKEREFVSSIGSDGRKTYANSVTGRFTISRDNANHTVYLQMNSLSPEDTAMYYCKTEYLYGLGCPDGSAYWGQGTQVTVSSASHHHHHH

SEQ ID NO: 230 - protein, 251 aa, Artificial Sequence
  Description of Artificial Sequence: Synthetic polypeptide
QVQLLESGGGLVQPGGSLRLSCAASGVRISTQDMSWVRQAPGKGLEWVSSILTPNGSTYYADSVKGRFTISRDNSKNTLYLQMNSLRAEDTAVYYCAGVDERCEAEDQIDYWGQGTLVTVSSGGGSQVQLQESGGGLVQPGGSLRLSCTASGFSFSSYPMTWARQAPGKGLEWVSTIASDGGSTAYAASVEGRFTISRDNAKSTLYLQLNSLKTEDTAMYYCTKGYGDGTPAPGQGTQVTVSSASHHHHHH

SEQ ID NO: 231 - protein, 254 aa, Artificial Sequence
  Description of Artificial Sequence: Synthetic polypeptide
QVQLLESGGGLVQPGGSLRLSCAASGVRISTQDMSWVRQAPGKGLEWVSSILTPNGSTYYADSVKGRFTISRDNSKNTLYLQMNSLRAEDTAVYYCAGVDERCEAEDQIDYWGQGTLVTVSSGGGSQVQLQESGGGLVQPGGSLRLSCAASGFTFSSAHMSWVRQAPGKGREWIASIYSGGGTFYADSVKGRFTISRDNAKNTLYLQLNSLKAEDTAMYYCATNRLHYYSDDDSLRGQGTQVTVSSASHHHHHH

SEQ ID NO: 232 - protein, 255 aa, Artificial Sequence
  Description of Artificial Sequence: Synthetic polypeptide
QVQLLESGGGLVQPGGSLRLSCAASGVRISTQDMSWVRQAPGKGLEWVSSILTPNGSTYYADSVKGRFTISRDNSKNTLYLQMNSLRAEDTAVYYCAGVDERCEAEDQIDYWGQGTLVTVSSGGGSQVQLQESGGGSVQAGGSLRLSCTASGFTFDDREMNWYRQAPGNECELVSTISSDGSTYYADSVKGRFTISQDNAKNTVYLQMDSVKPEDTAVYYCAADFMIAIQAPGAGCWGQGTQVTVSSASHHHHHH

SEQ ID NO: 233 - protein, 253 aa, Artificial Sequence
  Description of Artificial Sequence: Synthetic polypeptide
QVQLLESGGGLVQPGGSLRLSCAASGVRISTQDMSWVRQAPGKGLEWVSSILTPNGSTYYADSVKGRFTISRDNSKNTLYLQMNSLRAEDTAVYYCAGVDERCEAEDQIDYWGQGTLVTVSSGGGSQVQLQESGGGSVQAGGSLRLSCVASGYTSCMGWFRQAPGKEREAVATIYTRGRSIYYADSVKGRFTISQDNAKNTLYLQMNSLKPEDIAMYSCAAGGYSWSAGCEFNYWGQGTQVTVSSASHHHHHH

SEQ ID NO: 234 - protein, 259 aa, Artificial Sequence; identical to SEQ ID NO: 65
  Description of Artificial Sequence: Synthetic polypeptide

SEQ ID NO: 235 - protein, 261 aa, Artificial Sequence
  Description of Artificial Sequence: Synthetic polypeptide
QVQLLESGGGLVQPGGSLRLSCAASGVRISTQDMSWVRQAPGKGLEWVSSILTPNGSTYYADSVKGRFTISRDNSKNTLYLQMNSLRAEDTAVYYCAGVDERCEAEDQIDYWGQGTLVTVSSGGGSQVQLQESGGGSVQAGGSLRLSCVASGYTFSSYCMGWFRQAPGKEREGVAALGGGSTYYADSVKGRFTISQDNAKNTLYLQMNSLKPEDTAMYYCAAAWVACLEFGGSWYDLARYKHWGQGTQVTVSSASHHHHHH

SEQ ID NO: 236 - protein, 248 aa, Artificial Sequence
  Description of Artificial Sequence: Synthetic polypeptide
QVQLLESGGGLVQPGGSLRLSCAASGDMIISEDMSWVRQAPGKGLEWVSTIASDDGSTYYADSVKGRFTISRDNSKNTLYLQMNSLRAEDTAVYYCAGFDAQDAAIEYWGQGTLVTVSSGGGSQVQLQESGGGLVQPGGSLRLSCTASGFSFSSYPMTWARQAPGKGLEWVSTIASDGGSTAYAASVEGRFTISRDNAKSTLYLQLNSLKTEDTAMYYCTKGYGDGTPAPGQGTQVTVSSASHHHHHH

SEQ ID NO: 237 - protein, 251 aa, Artificial Sequence
  Description of Artificial Sequence: Synthetic polypeptide
QVQLLESGGGLVQPGGSLRLSCAASGDMIISEDMSWVRQAPGKGLEWVSTIASDDGSTYYADSVKGRFTISRDNSKNTLYLQMNSLRAEDTAVYYCAGFDAQDAAIEYWGQGTLVTVSSGGGSQVQLQESGGGLVQPGGSLRLSCAASGFTFSSAHMSWVRQAPGKGREWIASIYSGGGTFYADSVKGRFTISRDNAKNTLYLQLNSLKAEDTAMYYCATNRLHYYSDDDSLRGQGTQVTVSSASHHHHHH

SEQ ID NO: 238 - protein, 252 aa, Artificial Sequence
  Description of Artificial Sequence: Synthetic polypeptide
QVQLLESGGGLVQPGGSLRLSCAASGDMIISEDMSWVRQAPGKGLEWVSTIASDDGSTYYADSVKGRFTISRDNSKNTLYLQMNSLRAEDTAVYYCAGFDAQDAAIEYWGQGTLVTVSSGGGSQVQLQESGGGSVQAGGSLRLSCTASGFTFDDREMNWYRQAPGNECELVSTISSDGSTYYADSVKGRFTISQDNAKNTVYLQMDSVKPEDTAVYYCAADFMIAIQAPGAGCWGQGTQVTVSSASHHHHHH

SEQ ID NO: 239 - protein, 250 aa, Artificial Sequence; identical to SEQ ID NO: 66
  Description of Artificial Sequence: Synthetic polypeptide

SEQ ID NO: 240 - protein, 256 aa, Artificial Sequence
  Description of Artificial Sequence: Synthetic polypeptide
QVQLLESGGGLVQPGGSLRLSCAASGDMIISEDMSWVRQAPGKGLEWVSTIASDDGSTYYADSVKGRFTISRDNSKNTLYLQMNSLRAEDTAVYYCAGFDAQDAAIEYWGQGTLVTVSSGGGSQVQLQESGGGSVQAGGSLRLSCTASGFTFDDSDMGWYRQAPGNECELVSTISSDGSTYYADSVKGRFTISQDNAKNTVYLQMNSLKPEDTAVYYCAAEPRGYYSNYGGRRECNYWGQGTQVTVSSASHHHHHH

SEQ ID NO: 241 - protein, 258 aa, Artificial Sequence
  Description of Artificial Sequence: Synthetic polypeptide
QVQLLESGGGLVQPGGSLRLSCAASGDMIISEDMSWVRQAPGKGLEWVSTIASDDGSTYYADSVKGRFTISRDNSKNTLYLQMNSLRAEDTAVYYCAGFDAQDAAIEYWGQGTLVTVSSGGGSQVQLQESGGGSVQAGGSLRLSCVASGYTFSSYCMGWFRQAPGKEREGVAALGGGSTYYADSVKGRFTISQDNAKNTLYLQMNSLKPEDTAMYYCAAAWVACLEFGGSWYDLARYKHWGQGTQVTVSSASHHHHHH

SEQ ID NO: 242 - protein, 248 aa, Artificial Sequence
  Description of Artificial Sequence: Synthetic polypeptide
QVQLQESGGGSVQAGGSLRLSCVGSGYTYDTSDMSWYRQAPGKEREFVSDIDSGDWAAYADAVKGRFTISRDNAKKTVYLQMNSLEPEDTAMYYCKASYWKWGKLNNFWGPGTQVTVSSGGGSQVQLQESGGGLVQPGGSLRLSCTASGFSFSSYPMTWARQAPGKGLEWVSTIASDGGSTAYAASVEGRFTISRDNAKSTLYLQLNSLKTEDTAMYYCTKGYGDGTPAPGQGTQVTVSSASHHHHHH

SEQ ID NO: 243 - protein, 251 aa, Artificial Sequence
  Description of Artificial Sequence: Synthetic polypeptide
QVQLQESGGGSVQAGGSLRLSCVGSGYTYDTSDMSWYRQAPGKEREFVSDIDSGDWAAYADAVKGRFTISRDNAKKTVYLQMNSLEPEDTAMYYCKASYWKWGKLNNFWGPGTQVTVSSGGGSQVQLQESGGGLVQPGGSLRLSCAASGFTFSSAHMSWVRQAPGKGREWIASIYSGGGTFYADSVKGRFTISRDNAKNTLYLQLNSLKAEDTAMYYCATNRLHYYSDDDSLRGQGTQVTVSSASHHHHHH

SEQ ID NO: 244 - protein, 252 aa, Artificial Sequence
  Description of Artificial Sequence: Synthetic polypeptide
QVQLQESGGGSVQAGGSLRLSCVGSGYTYDTSDMSWYRQAPGKEREFVSDIDSGDWAAYADAVKGRFTISRDNAKKTVYLQMNSLEPEDTAMYYCKASYWKWGKLNNFWGPGTQVTVSSGGGSQVQLQESGGGSVQAGGSLRLSCTASGFTFDDREMNWYRQAPGNECELVSTISSDGSTYYADSVKGRFTISQDNAKNTVYLQMDSVKPEDTAVYYCAADFMIAIQAPGAGCWGQGTQVTVSSASHHHHHH

SEQ ID NO: 245 - protein, 250 aa, Artificial Sequence
  Description of Artificial Sequence: Synthetic polypeptide
QVQLQESGGGSVQAGGSLRLSCVGSGYTYDTSDMSWYRQAPGKEREFVSDIDSGDWAAYADAVKGRFTISRDNAKKTVYLQMNSLEPEDTAMYYCKASYWKWGKLNNFWGPGTQVTVSSGGGSQVQLQESGGGSVQAGGSLRLSCVASGYTSCMGWFRQAPGKEREAVATIYTRGRSIYYADSVKGRFTISQDNAKNTLYLQMNSLKPEDIAMYSCAAGGYSWSAGCEFNYWGQGTQVTVSSASHHHHHH

SEQ ID NO: 246 - protein, 256 aa, Artificial Sequence
  Description of Artificial Sequence: Synthetic polypeptide
QVQLQESGGGSVQAGGSLRLSCVGSGYTYDTSDMSWYRQAPGKEREFVSDIDSGDWAAYADAVKGRFTISRDNAKKTVYLQMNSLEPEDTAMYYCKASYWKWGKLNNFWGPGTQVTVSSGGGSQVQLQESGGGSVQAGGSLRLSCTASGFTFDDSDMGWYRQAPGNECELVSTISSDGSTYYADSVKGRFTISQDNAKNTVYLQMNSLKPEDTAVYYCAAEPRGYYSNYGGRRECNYWGQGTQVTVSSASHHHHHH

SEQ ID NO: 247 - protein, 258 aa, Artificial Sequence
  Description of Artificial Sequence: Synthetic polypeptide
QVQLQESGGGSVQAGGSLRLSCVGSGYTYDTSDMSWYRQAPGKEREFVSDIDSGDWAAYADAVKGRFTISRDNAKKTVYLQMNSLEPEDTAMYYCKASYWKWGKLNNFWGPGTQVTVSSGGGSQVQLQESGGGSVQAGGSLRLSCVASGYTFSSYCMGWFRQAPGKEREGVAALGGGSTYYADSVKGRFTISQDNAKNTLYLQMNSLKPEDTAMYYCAAAWVACLEFGGSWYDLARYKHWGQGTQVTVSSASHHHHHH

SEQ ID NO: 248 - protein, 251 aa, Artificial Sequence
  Description of Artificial Sequence: Synthetic polypeptide
QVQLQESGGGLVQPGGSLKLSCAASGFRFSNYGMSWVRQAPGEGLEWVSYINGDGSRTHYADSVKGRFTISRDNAKNTLYLQLNSLKTEDTAMYYCEKGLSRDGWSLSAASRGQGTQVTVSSGGGSQVQLQESGGGLVQPGGSLRLSCTASGFSFSSYPMTWARQAPGKGLEWVSTIASDGGSTAYAASVEGRFTISRDNAKSTLYLQLNSLKTEDTAMYYCTKGYGDGTPAPGQGTQVTVSSASHHHHHH

SEQ ID NO: 249 - protein, 254 aa, Artificial Sequence
  Description of Artificial Sequence: Synthetic polypeptide
QVQLQESGGGLVQPGGSLKLSCAASGFRFSNYGMSWVRQAPGEGLEWVSYINGDGSRTHYADSVKGRFTISRDNAKNTLYLQLNSLKTEDTAMYYCEKGLSRDGWSLSAASRGQGTQVTVSSGGGSQVQLQESGGGLVQPGGSLRLSCAASGFTFSSAHMSWVRQAPGKGREWIASIYSGGGTFYADSVKGRFTISRDNAKNTLYLQLNSLKAEDTAMYYCATNRLHYYSDDDSLRGQGTQVTVSSASHHHHHH

SEQ ID NO: 250 - protein, 255 aa, Artificial Sequence
  Description of Artificial Sequence: Synthetic polypeptide
QVQLQESGGGLVQPGGSLKLSCAASGFRFSNYGMSWVRQAPGEGLEWVSYINGDGSRTHYADSVKGRFTISRDNAKNTLYLQLNSLKTEDTAMYYCEKGLSRDGWSLSAASRGQGTQVTVSSGGGSQVQLQESGGGSVQAGGSLRLSCTASGFTFDDREMNWYRQAPGNECELVSTISSDGSTYYADSVKGRFTISQDNAKNTVYLQMDSVKPEDTAVYYCAADFMIAIQAPGAGCWGQGTQVTVSSASHHHHHH

SEQ ID NO: 251 - protein, 253 aa, Artificial Sequence
  Description of Artificial Sequence: Synthetic polypeptide
QVQLQESGGGLVQPGGSLKLSCAASGFRFSNYGMSWVRQAPGEGLEWVSYINGDGSRTHYADSVKGRFTISRDNAKNTLYLQLNSLKTEDTAMYYCEKGLSRDGWSLSAASRGQGTQVTVSSGGGSQVQLQESGGGSVQAGGSLRLSCVASGYTSCMGWFRQAPGKEREAVATIYTRGRSIYYADSVKGRFTISQDNAKNTLYLQMNSLKPEDIAMYSCAAGGYSWSAGCEFNYWGQGTQVTVSSASHHHHHH

SEQ ID NO: 252 - protein, 259 aa, Artificial Sequence; identical to SEQ ID NO: 67
  Description of Artificial Sequence: Synthetic polypeptide

SEQ ID NO: 253 - protein, 261 aa, Artificial Sequence
  Description of Artificial Sequence: Synthetic polypeptide
QVQLQESGGGLVQPGGSLKLSCAASGFRFSNYGMSWVRQAPGEGLEWVSYINGDGSRTHYADSVKGRFTISRDNAKNTLYLQLNSLKTEDTAMYYCEKGLSRDGWSLSAASRGQGTQVTVSSGGGSQVQLQESGGGSVQAGGSLRLSCVASGYTFSSYCMGWFRQAPGKEREGVAALGGGSTYYADSVKGRFTISQDNAKNTLYLQMNSLKPEDTAMYYCAAAWVACLEFGGSWYDLARYKHWGQGTQVTVSSASHHHHHH

SEQ ID NO: 254 - protein, 254 aa, Artificial Sequence; identical to SEQ ID NO: 68
  Description of Artificial Sequence: Synthetic polypeptide

SEQ ID NO: 255 - protein, 257 aa, Artificial Sequence; identical to SEQ ID NO: 69
  Description of Artificial Sequence: Synthetic polypeptide

SEQ ID NO: 256 - protein, 258 aa, Artificial Sequence; identical to SEQ ID NO: 70
  Description of Artificial Sequence: Synthetic polypeptide

SEQ ID NO: 257 - protein, 256 aa, Artificial Sequence; identical to SEQ ID NO: 71
  Description of Artificial Sequence: Synthetic polypeptide

SEQ ID NO: 258 - protein, 262 aa, Artificial Sequence; identical to SEQ ID NO: 72
  Description of Artificial Sequence: Synthetic polypeptide

SEQ ID NO: 259 - protein, 264 aa, Artificial Sequence; identical to SEQ ID NO: 73
  Description of Artificial Sequence: Synthetic polypeptide

SEQ ID NO: 260 - protein, 245 aa, Artificial Sequence; identical to SEQ ID NO: 74
  Description of Artificial Sequence: Synthetic polypeptide

SEQ ID NO: 261 - protein, 248 aa, Artificial Sequence
  Description of Artificial Sequence: Synthetic polypeptide
QVQLQESGGGLVQPGGSLRLSCVASGFTFSNYWIFWVRQAAGKGLEWLSTSNTGGDTTKYADSVKGRFTISRDSAKNTEYLQMNSLKPEDTAVYYCETGRCARSGGYQGTQVTVSSGGGSQVQLQESGGGLVQPGGSLRLSCAASGFTFSSAHMSWVRQAPGKGREWIASIYSGGGTFYADSVKGRFTISRDNAKNTLYLQLNSLKAEDTAMYYCATNRLHYYSDDDSLRGQGTQVTVSSASHHHHHH

SEQ ID NO: 262 - protein, 249 aa, Artificial Sequence; identical to SEQ ID NO: 75
  Description of Artificial Sequence: Synthetic polypeptide

SEQ ID NO: 263 - protein, 247 aa, Artificial Sequence
  Description of Artificial Sequence: Synthetic polypeptide
QVQLQESGGGLVQPGGSLRLSCVASGFTFSNYWIFWVRQAAGKGLEWLSTSNTGGDTTKYADSVKGRFTISRDSAKNTEYLQMNSLKPEDTAVYYCETGRCARSGGYQGTQVTVSSGGGSQVQLQESGGGSVQAGGSLRLSCVASGYTSCMGWFRQAPGKEREAVATIYTRGRSIYYADSVKGRFTISQDNAKNTLYLQMNSLKPEDIAMYSCAAGGYSWSAGCEFNYWGQGTQVTVSSASHHHHHH

SEQ ID NO: 264 - protein, 253 aa, Artificial Sequence
  Description of Artificial Sequence: Synthetic polypeptide
QVQLQESGGGLVQPGGSLRLSCVASGFTFSNYWIFWVRQAAGKGLEWLSTSNTGGDTTKYADSVKGRFTISRDSAKNTEYLQMNSLKPEDTAVYYCETGRCARSGGYQGTQVTVSSGGGSQVQLQESGGGSVQAGGSLRLSCTASGFTFDDSDMGWYRQAPGNECELVSTISSDGSTYYADSVKGRFTISQDNAKNTVYLQMNSLKPEDTAVYYCAAEPRGYYSNYGGRRECNYWGQGTQVTVSSASHHHHHH

SEQ ID NO: 265 - protein, 255 aa, Artificial Sequence
  Description of Artificial Sequence: Synthetic polypeptide
QVQLQESGGGLVQPGGSLRLSCVASGFTFSNYWIFWVRQAAGKGLEWLSTSNTGGDTTKYADSVKGRFTISRDSAKNTEYLQMNSLKPEDTAVYYCETGRCARSGGYQGTQVTVSSGGGSQVQLQESGGGSVQAGGSLRLSCVASGYTFSSYCMGWFRQAPGKEREGVAALGGGSTYYADSVKGRFTISQDNAKNTLYLQMNSLKPEDTAMYYCAAAWVACLEFGGSWYDLARYKHWGQGTQVTVSSASHHHHHH

SEQ ID NO: 266 - protein, 253 aa, Artificial Sequence
  Description of Artificial Sequence: Synthetic polypeptide
QVQLQESGGGSVQVGGSLRLSCATSGDTKSIRCMGWFRQTPGKEREGIAAIDREGFATYADSVYDRFTIAQDNAQNTLYLEMNALKPEDTAMYYCAAQNMCRVVRGAMTGVDYWGKGTQVTVSSGGGSQVQLQESGGGLVQPGGSLRLSCTASGFSFSSYPMTWARQAPGKGLEWVSTIASDGGSTAYAASVEGRFTISRDNAKSTLYLQLNSLKTEDTAMYYCTKGYGDGTPAPGQGTQVTVSSASHHHHHH

SEQ ID NO: 267 - protein, 256 aa, Artificial Sequence
  Description of Artificial Sequence: Synthetic polypeptide
QVQLQESGGGSVQVGGSLRLSCATSGDTKSIRCMGWFRQTPGKEREGIAAIDREGFATYADSVYDRFTIAQDNAQNTLYLEMNALKPEDTAMYYCAAQNMCRVVRGAMTGVDYWGKGTQVTVSSGGGSQVQLQESGGGLVQPGGSLRLSCAASGFTFSSAHMSWVRQAPGKGREWIASIYSGGGTFYADSVKGRFTISRDNAKNTLYLQLNSLKAEDTAMYYCATNRLHYYSDDDSLRGQGTQVTVSSASHHHHHH

SEQ ID NO: 268 - protein, 257 aa, Artificial Sequence
  Description of Artificial Sequence: Synthetic polypeptide
QVQLQESGGGSVQVGGSLRLSCATSGDTKSIRCMGWFRQTPGKEREGIAAIDREGFATYADSVYDRFTIAQDNAQNTLYLEMNALKPEDTAMYYCAAQNMCRVVRGAMTGVDYWGKGTQVTVSSGGGSQVQLQESGGGSVQAGGSLRLSCTASGFTFDDREMNWYRQAPGNECELVSTISSDGSTYYADSVKGRFTISQDNAKNTVYLQMDSVKPEDTAVYYCAADFMIAIQAPGAGCWGQGTQVTVSSASHHHHHH

SEQ ID NO: 269 - protein, 255 aa, Artificial Sequence
  Description of Artificial Sequence: Synthetic polypeptide
QVQLQESGGGSVQVGGSLRLSCATSGDTKSIRCMGWFRQTPGKEREGIAAIDREGFATYADSVYDRFTIAQDNAQNTLYLEMNALKPEDTAMYYCAAQNMCRVVRGAMTGVDYWGKGTQVTVSSGGGSQVQLQESGGGSVQAGGSLRLSCVASGYTSCMGWFRQAPGKEREAVATIYTRGRSIYYADSVKGRFTISQDNAKNTLYLQMNSLKPEDIAMYSCAAGGYSWSAGCEFNYWGQGTQVTVSSASHHHHHH

SEQ ID NO: 270 - protein, 261 aa, Artificial Sequence
  Description of Artificial Sequence: Synthetic polypeptide
QVQLQESGGGSVQVGGSLRLSCATSGDTKSIRCMGWFRQTPGKEREGIAAIDREGFATYADSVYDRFTIAQDNAQNTLYLEMNALKPEDTAMYYCAAQNMCRVVRGAMTGVDYWGKGTQVTVSSGGGSQVQLQESGGGSVQAGGSLRLSCTASGFTFDDSDMGWYRQAPGNECELVSTISSDGSTYYADSVKGRFTISQDNAKNTVYLQMNSLKPEDTAVYYCAAEPRGYYSNYGGRRECNYWGQGTQVTVSSASHHHHHH

SEQ ID NO: 271 - protein, 263 aa, Artificial Sequence
  Description of Artificial Sequence: Synthetic polypeptide
QVQLQESGGGSVQVGGSLRLSCATSGDTKSIRCMGWFRQTPGKEREGIAAIDREGFATYADSVYDRFTIAQDNAQNTLYLEMNALKPEDTAMYYCAAQNMCRVVRGAMTGVDYWGKGTQVTVSSGGGSQVQLQESGGGSVQAGGSLRLSCVASGYTFSSYCMGWFRQAPGKEREGVAALGGGSTYYADSVKGRFTISQDNAKNTLYLQMNSLKPEDTAMYYCAAAWVACLEFGGSWYDLARYKHWGQGTQVTVSSASHHHHHH

SEQ ID NO: 272 - protein, 254 aa, Artificial Sequence
  Description of Artificial Sequence: Synthetic polypeptide
QVQLQESGGGSVQVGGSLKLSCAASGYTYSSYYCMGWFRQAPGKEREGVAAIDSDGSTSYADSVKGRFTISQDDAKNTLYLQMNSLKPEDTAMYYCAASYEVVDCYPSGYGQDYWGKGTQVTVSSGGGSQVQLQESGGGLVQPGGSLRLSCTASGFSFSSYPMTWARQAPGKGLEWVSTIASDGGSTAYAASVEGRFTISRDNAKSTLYLQLNSLKTEDTAMYYCTKGYGDGTPAPGQGTQVTVSSASHHHHHH

SEQ ID NO: 273 - protein, 257 aa, Artificial Sequence
  Description of Artificial Sequence: Synthetic polypeptide
QVQLQESGGGSVQVGGSLKLSCAASGYTYSSYYCMGWFRQAPGKEREGVAAIDSDGSTSYADSVKGRFTISQDDAKNTLYLQMNSLKPEDTAMYYCAASYEVVDCYPSGYGQDYWGKGTQVTVSSGGGSQVQLQESGGGLVQPGGSLRLSCAASGFTFSSAHMSWVRQAPGKGREWIASIYSGGGTFYADSVKGRFTISRDNAKNTLYLQLNSLKAEDTAMYYCATNRLHYYSDDDSLRGQGTQVTVSSASHHHHHH

SEQ ID NO: 274 - protein, 258 aa, Artificial Sequence; identical to SEQ ID NO: 76
  Description of Artificial Sequence: Synthetic polypeptide

SEQ ID NO: 275 - protein, 256 aa, Artificial Sequence
  Description of Artificial Sequence: Synthetic polypeptide
QVQLQESGGGSVQVGGSLKLSCAASGYTYSSYYCMGWFRQAPGKEREGVAAIDSDGSTSYADSVKGRFTISQDDAKNTLYLQMNSLKPEDTAMYYCAASYEVVDCYPSGYGQDYWGKGTQVTVSSGGGSQVQLQESGGGSVQAGGSLRLSCVASGYTSCMGWFRQAPGKEREAVATIYTRGRSIYYADSVKGRFTISQDNAKNTLYLQMNSLKPEDIAMYSCAAGGYSWSAGCEFNYWGQGTQVTVSSASHHHHHH

SEQ ID NO: 276 - protein, 262 aa, Artificial Sequence
  Description of Artificial Sequence: Synthetic polypeptide
QVQLQESGGGSVQVGGSLKLSCAASGYTYSSYYCMGWFRQAPGKEREGVAAIDSDGSTSYADSVKGRFTISQDDAKNTLYLQMNSLKPEDTAMYYCAASYEVVDCYPSGYGQDYWGKGTQVTVSSGGGSQVQLQESGGGSVQAGGSLRLSCTASGFTFDDSDMGWYRQAPGNECELVSTISSDGSTYYADSVKGRFTISQDNAKNTVYLQMNSLKPEDTAVYYCAAEPRGYYSNYGGRRECNYWGQGTQVTVSSASHHHHHH

SEQ ID NO: 277 - protein, 264 aa, Artificial Sequence
  Description of Artificial Sequence: Synthetic polypeptide
QVQLQESGGGSVQVGGSLKLSCAASGYTYSSYYCMGWFRQAPGKEREGVAAIDSDGSTSYADSVKGRFTISQDDAKNTLYLQMNSLKPEDTAMYYCAASYEVVDCYPSGYGQDYWGKGTQVTVSSGGGSQVQLQESGGGSVQAGGSLRLSCVASGYTFSSYCMGWFRQAPGKEREGVAALGGGSTYYADSVKGRFTISQDNAKNTLYLQMNSLKPEDTAMYYCAAAWVACLEFGGSWYDLARYKHWGQGTQVTVSSASHHHHHH

SEQ ID NO: 278 - protein, 253 aa, Artificial Sequence; identical to SEQ ID NO: 77
  Description of Artificial Sequence: Synthetic polypeptide

SEQ ID NO: 279 - protein, 256 aa, Artificial Sequence; identical to SEQ ID NO: 78
  Description of Artificial Sequence: Synthetic polypeptide

SEQ ID NO: 280 - protein, 257 aa, Artificial Sequence
  Description of Artificial Sequence: Synthetic polypeptide
QVQLQESGGGSVQAGGSLRLSCAASEYTASRYCMAWFRQAPGKEREGVAAIHPGGGTTYYADSVKGRFSISQDSADNTLYLQMNSLKPEDTAMYYCAAGSLWVPFGDRCAANYWGQGTQVTVSSGGGSQVQLQESGGGSVQAGGSLRLSCTASGFTFDDREMNWYRQAPGNECELVSTISSDGSTYYADSVKGRFTISQDNAKNTVYLQMDSVKPEDTAVYYCAADFMIAIQAPGAGCWGQGTQVTVSSASHHHHHH

SEQ ID NO: 281 - protein, 255 aa, Artificial Sequence
  Description of Artificial Sequence: Synthetic polypeptide
QVQLQESGGGSVQAGGSLRLSCAASEYTASRYCMAWFRQAPGKEREGVAAIHPGGGTTYYADSVKGRFSISQDSADNTLYLQMNSLKPEDTAMYYCAAGSLWVPFGDRCAANYWGQGTQVTVSSGGGSQVQLQESGGGSVQAGGSLRLSCVASGYTSCMGWFRQAPGKEREAVATIYTRGRSIYYADSVKGRFTISQDNAKNTLYLQMNSLKPEDIAMYSCAAGGYSWSAGCEFNYWGQGTQVTVSSASHHHHHH

SEQ ID NO: 282 - protein, 261 aa, Artificial Sequence; identical to SEQ ID NO: 79
  Description of Artificial Sequence: Synthetic polypeptide

SEQ ID NO: 283 - protein, 263 aa, Artificial Sequence
  Description of Artificial Sequence: Synthetic polypeptide
QVQLQESGGGSVQAGGSLRLSCAASEYTASRYCMAWFRQAPGKEREGVAAIHPGGGTTYYADSVKGRFSISQDSADNTLYLQMNSLKPEDTAMYYCAAGSLWVPFGDRCAANYWGQGTQVTVSSGGGSQVQLQESGGGSVQAGGSLRLSCVASGYTFSSYCMGWFRQAPGKEREGVAALGGGSTYYADSVKGRFTISQDNAKNTLYLQMNSLKPEDTAMYYCAAAWVACLEFGGSWYDLARYKHWGQGTQVTVSSASHHHHHH

SEQ ID NO: 284 - protein, 251 aa, Artificial Sequence
  Description of Artificial Sequence: Synthetic polypeptide
QVQLQESGGGSVQAGGSLRLSCAASGYEYCRIHMTWYRQGPGKEREFVSSIGSDGRKTYANSVTGRFTISRDNANHTVYLQMNSLSPEDTAMYYCKTEYLYGLGCPDGSAYWGQGTQVTVSSGGGSQVQLQESGGGLVQPGGSLRLSCTASGFSFSSYPMTWARQAPGKGLEWVSTIASDGGSTAYAASVEGRFTISRDNAKSTLYLQLNSLKTEDTAMYYCTKGYGDGTPAPGQGTQVTVSSASHHHHHH

SEQ ID NO: 285 - protein, 254 aa, Artificial Sequence; identical to SEQ ID NO: 80
  Description of Artificial Sequence: Synthetic polypeptide

SEQ ID NO: 286 - protein, 255 aa, Artificial Sequence
  Description of Artificial Sequence: Synthetic polypeptide
QVQLQESGGGSVQAGGSLRLSCAASGYEYCRIHMTWYRQGPGKEREFVSSIGSDGRKTYANSVTGRFTISRDNANHTVYLQMNSLSPEDTAMYYCKTEYLYGLGCPDGSAYWGQGTQVTVSSGGGSQVQLQESGGGSVQAGGSLRLSCTASGFTFDDREMNWYRQAPGNECELVSTISSDGSTYYADSVKGRFTISQDNAKNTVYLQMDSVKPEDTAVYYCAADFMIAIQAPGAGCWGQGTQVTVSSASHHHHHH

SEQ ID NO: 287 - protein, 253 aa, Artificial Sequence
  Description of Artificial Sequence: Synthetic polypeptide
QVQLQESGGGSVQAGGSLRLSCAASGYEYCRIHMTWYRQGPGKEREFVSSIGSDGRKTYANSVTGRFTISRDNANHTVYLQMNSLSPEDTAMYYCKTEYLYGLGCPDGSAYWGQGTQVTVSSGGGSQVQLQESGGGSVQAGGSLRLSCVASGYTSCMGWFRQAPGKEREAVATIYTRGRSIYYADSVKGRFTISQDNAKNTLYLQMNSLKPEDIAMYSCAAGGYSWSAGCEFNYWGQGTQVTVSSASHHHHHH

SEQ ID NO: 288 - protein, 259 aa, Artificial Sequence
  Description of Artificial Sequence: Synthetic polypeptide
QVQLQESGGGSVQAGGSLRLSCAASGYEYCRIHMTWYRQGPGKEREFVSSIGSDGRKTYANSVTGRFTISRDNANHTVYLQMNSLSPEDTAMYYCKTEYLYGLGCPDGSAYWGQGTQVTVSSGGGSQVQLQESGGGSVQAGGSLRLSCTASGFTFDDSDMGWYRQAPGNECELVSTISSDGSTYYADSVKGRFTISQDNAKNTVYLQMNSLKPEDTAVYYCAAEPRGYYSNYGGRRECNYWGQGTQVTVSSASHHHHHH

SEQ ID NO: 289 - protein, 261 aa, Artificial Sequence
  Description of Artificial Sequence: Synthetic polypeptide
QVQLQESGGGSVQAGGSLRLSCAASGYEYCRIHMTWYRQGPGKEREFVSSIGSDGRKTYANSVTGRFTISRDNANHTVYLQMNSLSPEDTAMYYCKTEYLYGLGCPDGSAYWGQGTQVTVSSGGGSQVQLQESGGGSVQAGGSLRLSCVASGYTFSSYCMGWFRQAPGKEREGVAALGGGSTYYADSVKGRFTISQDNAKNTLYLQMNSLKPEDTAMYYCAAAWVACLEFGGSWYDLARYKHWGQGTQVTVSSASHHHHHH

SEQ ID NO: 290 - DNA, 753 bp, Artificial Sequence
  Description of Artificial Sequence: Synthetic polynucleotide
caagtgcagctgcaagagagcggaggaggactggtccagcccggcggctctctgaggctgagctgcactgcttccggcttcagcttcagcagctaccctatgacatgggctaggcaagcccccggcaaaggactggaatgggtgagcactattgccagcgatggaggcagcacagcctacgctgccagcgtggagggaaggttcacaatctctagggacaatgccaagagcacactgtatctgcagctgaactctctgaagacagaggacactgccatgtactactgcactaagggctacggcgatggcacaccagctcccggccaaggcacacaagtgactgtctcgagcggcggaggatcccaggttcagctgctggaatctggcggaggattggttcagcctggcggctctctgagactgtcttgtgctgcttctggcgtgcggatcagcacccaggatatgagctgggtccgacaggctcctggcaaaggactggaatgggtgtcctccatcctgacacctaacggctccacctactacgccgactccgtgaagggcagattcaccatctctcgggacaactccaagaacaccctgtacctgcagatgaactccctgagagccgaggacaccgccgtgtactattgtgctggcgtggacgagagatgcgaggccgaggatcagatcgattattggggccagggcaccctggtcaccgtttcttctgctagccaccatcaccatcaccac

SEQ ID NO: 291 - DNA, 744 bp, Artificial Sequence
  Description of Artificial Sequence: Synthetic polynucleotide
caagtgcagctgcaagagagcggaggaggactggtccagcccggcggctctctgaggctgagctgcactgcttccggcttcagcttcagcagctaccctatgacatgggctaggcaagcccccggcaaaggactggaatgggtgagcactattgccagcgatggaggcagcacagcctacgctgccagcgtggagggaaggttcacaatctctagggacaatgccaagagcacactgtatctgcagctgaactctctgaagacagaggacactgccatgtactactgcactaagggctacggcgatggcacaccagctcccggccaaggcacacaagtgactgtctcgagcggcggaggatcccaggttcagctgctggaatctggcggaggattggttcagcctggcggctctctgagactgtcttgtgctgcctctggcgacatgatcatctccgaggacatgagctgggtccgacaggctcctggcaaaggactggaatgggtgtccacaatcgcctccgacgacggctctacctactacgccgattccgtgaagggcagattcaccatcagccgggacaactccaagaacaccctgtacctgcagatgaactccctgagagccgaggacaccgccgtgtactattgtgccggcttcgatgcccaggatgccgccattgaatattggggccagggcaccctggtcaccgtttcttctgctagccaccatcaccatcaccac

SEQ ID NO: 292 - DNA, 744 bp, Artificial Sequence; identical to SEQ ID NO: 128
  Description of Artificial Sequence: Synthetic polynucleotide

SEQ ID NO: 293 - DNA, 753 bp, Artificial Sequence; identical to SEQ ID NO: 129
  Description of Artificial Sequence: Synthetic polynucleotide

SEQ ID NO: 294 - DNA, 762 bp, Artificial Sequence; identical to SEQ ID NO: 130
  Description of Artificial Sequence: Synthetic polynucleotide

SEQ ID NO: 295 - DNA, 735 bp, Artificial Sequence
  Description of Artificial Sequence: Synthetic polynucleotide
caagtgcagctgcaagagagcggaggaggactggtccagcccggcggctctctgaggctgagctgcactgcttccggcttcagcttcagcagctaccctatgacatgggctaggcaagcccccggcaaaggactggaatgggtgagcactattgccagcgatggaggcagcacagcctacgctgccagcgtggagggaaggttcacaatctctagggacaatgccaagagcacactgtatctgcagctgaactctctgaagacagaggacactgccatgtactactgcactaagggctacggcgatggcacaccagctcccggccaaggcacacaagtgactgtctcgagcggcggaggatcccaggttcagctgcaagagtctggcggaggattggttcagcctggcggatctctgagactgtcctgtgtggcctctggcttcaccttctccaactactggatcttctgggtccgacaggccgctggcaaaggactggaatggctgtccacctctaacaccggcggagacaccactaagtacgccgactctgtgaagggcagattcaccatctccagagacagcgccaagaacaccgagtacctgcagatgaactccctgaagcctgaggacaccgccgtgtactactgcgagacaggcagatgcgctagatccggcggctatcagggcacccaagtgacagtttcttctgctagccaccatcaccatcaccac

SEQ ID NO: 296 - DNA, 759 bp, Artificial Sequence; identical to SEQ ID NO: 131
  Description of Artificial Sequence: Synthetic polynucleotide

SEQ ID NO: 297 - DNA, 762 bp, Artificial Sequence; identical to SEQ ID NO: 132
  Description of Artificial Sequence: Synthetic polynucleotide

SEQ ID NO: 298 - DNA, 759 bp, Artificial Sequence
  Description of Artificial Sequence: Synthetic polynucleotide
caagtgcagctgcaagagagcggaggaggactggtccagcccggcggctctctgaggctgagctgcactgcttccggcttcagcttcagcagctaccctatgacatgggctaggcaagcccccggcaaaggactggaatgggtgagcactattgccagcgatggaggcagcacagcctacgctgccagcgtggagggaaggttcacaatctctagggacaatgccaagagcacactgtatctgcagctgaactctctgaagacagaggacactgccatgtactactgcactaagggctacggcgatggcacaccagctcccggccaaggcacacaagtgactgtctcgagcggcggaggatcccaggttcagctgcaagaatctggcggcggatctgttcaggctggcggatctctgagactgtcttgtgccgcctccgagtacaccgcctccagatactgtatggcctggttcagacaggcccctggcaaagagagagaaggcgtcgccgctattcatcctggcggaggcaccacctactacgccgattctgtgaagggcagattctccatcagccaggactccgccgacaacaccctgtacctgcagatgaactccctgaagcctgaggacaccgccatgtactactgtgccgctggatctctgtgggtgcccttcggcgatagatgtgccgctaattattggggccagggcacacaagtgaccgtttcttctgctagccaccatcaccatcaccac

SEQ ID NO: 299 - DNA, 753 bp, Artificial Sequence
  Description of Artificial Sequence: Synthetic polynucleotide
caagtgcagctgcaagagagcggaggaggactggtccagcccggcggctctctgaggctgagctgcactgcttccggcttcagcttcagcagctaccctatgacatgggctaggcaagcccccggcaaaggactggaatgggtgagcactattgccagcgatggaggcagcacagcctacgctgccagcgtggagggaaggttcacaatctctagggacaatgccaagagcacactgtatctgcagctgaactctctgaagacagaggacactgccatgtactactgcactaagggctacggcgatggcacaccagctcccggccaaggcacacaagtgactgtctcgagcggcggaggatcccaggttcagctgcaagaatctggcggcggatctgttcaggctggcggatctctgagactgtcttgtgccgcttccggctacgagtactgcagaatccacatgacctggtacagacaaggccctggcaaagagagagagttcgtcagctccatcggctccgacggcagaaagacctacgccaattctgtgaccggcagattcaccatcagccgggacaacgccaaccacaccgtgtacctgcagatgaactccctgtctcctgaggacaccgccatgtactactgcaagaccgagtacctgtacggcctgggctgtcctgatggctctgcttattggggccagggcacccaagtgaccgtttcttctgctagccaccatcaccatcaccac

SEQ ID NO: 300 - DNA, 762 bp, Artificial Sequence; identical to SEQ ID NO: 133
  Description of Artificial Sequence: Synthetic polynucleotide

SEQ ID NO: 301 - DNA, 753 bp, Artificial Sequence; identical to SEQ ID NO: 134
  Description of Artificial Sequence: Synthetic polynucleotide

SEQ ID NO: 302 - DNA, 753 bp, Artificial Sequence; identical to SEQ ID NO: 135
  Description of Artificial Sequence: Synthetic polynucleotide

SEQ ID NO: 303 - DNA, 762 bp, Artificial Sequence; identical to SEQ ID NO: 136
  Description of Artificial Sequence: Synthetic polynucleotide

SEQ ID NO: 304 - DNA, 771 bp, Artificial Sequence
  Description of Artificial Sequence: Synthetic polynucleotide
caagtgcagctgcaagagagcggaggaggactggtgcagcccggcggctctctgaggctgagctgtgctgccagcggcttcactttcagcagcgctcacatgagctgggtgaggcaagcccccggcaaaggaagggagtggatcgcctccatctacagcggcggcggaacattctacgccgacagcgtgaagggaaggttcacaatctctagggacaacgccaagaacacactgtatctgcagctgaactctctgaaggccgaggacactgccatgtactactgcgccactaataggctgcactactacagcgacgatgattctctgaggggccaaggcacacaagtgacagtctcgagcggcggaggatcccaggttcagctgcaagaatctggcggcggatctgttcagacaggcggctctctgagactgtcctgtgctgtgtccggctacaccacctacagcttcaactacatgggctggttcaggcaggcccctggcaaagaacgagaaggcgtggccgtgatctataccggcggaggctctaccctgtacgccgactctgtgaagggcagattcaccatcagccaggacaacgccaagaacaccgtgtacctgcagatgaactccctgaagcctgaggacaccgccatgtactactgtgccgccgacgaccagagattcgcctctcctctgtacgcctacttcggctattggggccagggcacccaagtgacagtttcttctgctagccaccatcaccatcaccac

SEQ ID NO: 305 - DNA, 744 bp, Artificial Sequence; identical to SEQ ID NO: 137
  Description of Artificial Sequence: Synthetic polynucleotide

SEQ ID NO: 306 - DNA, 768 bp, Artificial Sequence; identical to SEQ ID NO: 138
  Description of Artificial Sequence: Synthetic polynucleotide

SEQ ID NO: 307 - DNA, 771 bp, Artificial Sequence
  Description of Artificial Sequence: Synthetic polynucleotide
caagtgcagctgcaagagagcggaggaggactggtgcagcccggcggctctctgaggctgagctgtgctgccagcggcttcactttcagcagcgctcacatgagctgggtgaggcaagcccccggcaaaggaagggagtggatcgcctccatctacagcggcggcggaacattctacgccgacagcgtgaagggaaggttcacaatctctagggacaacgccaagaacacactgtatctgcagctgaactctctgaaggccgaggacactgccatgtactactgcgccactaataggctgcactactacagcgacgatgattctctgaggggccaaggcacacaagtgacagtctcgagcggcggaggatcccaggttcagctgcaagaatctggcggaggctctgtgcaagtcggcggatctctgaagctgtcttgtgccgcctccggctacacctactccagctactactgcatgggctggttcagacaggcccctggcaaagagagagaaggcgtcgccgccatcgactctgatggctctacctcttacgccgactccgtgaagggcagattcaccatctctcaggacgacgccaagaacaccctgtacctgcagatgaactccctgaagcctgaggacaccgccatgtactactgcgccgcttcttacgaggtggtggactgctacccttctggctacggccaggattattggggcaagggcacccaagtgaccgtttcttctgctagccaccatcaccatcaccac

SEQ ID NO: 308 - DNA, 768 bp, Artificial Sequence
  Description of Artificial Sequence: Synthetic polynucleotide
caagtgcagctgcaagagagcggaggaggactggtgcagcccggcggctctctgaggctgagctgtgctgccagcggcttcactttcagcagcgctcacatgagctgggtgaggcaagcccccggcaaaggaagggagtggatcgcctccatctacagcggcggcggaacattctacgccgacagcgtgaagggaaggttcacaatctctagggacaacgccaagaacacactgtatctgcagctgaactctctgaaggccgaggacactgccatgtactactgcgccactaataggctgcactactacagcgacgatgattctctgaggggccaaggcacacaagtgacagtctcgagcggcggaggatcccaggttcagctgcaagaatctggcggcggatctgttcaggctggcggatctctgagactgtcttgtgccgcctccgagtacaccgcctccagatactgtatggcctggttcagacaggcccctggcaaagagagagaaggcgtcgccgctattcatcctggcggaggcaccacctactacgccgattctgtgaagggcagattctccatcagccaggactccgccgacaacaccctgtacctgcagatgaactccctgaagcctgaggacaccgccatgtactactgtgccgctggatctctgtgggtgcccttcggcgatagatgtgccgctaattattggggccagggcacacaagtgaccgtttcttctgctagccaccatcaccatcaccac

SEQ ID NO: 309 - DNA, 762 bp, Artificial Sequence
  Description of Artificial Sequence: Synthetic polynucleotide
caagtgcagctgcaagagagcggaggaggactggtgcagcccggcggctctctgaggctgagctgtgctgccagcggcttcactttcagcagcgctcacatgagctgggtgaggcaagcccccggcaaaggaagggagtggatcgcctccatctacagcggcggcggaacattctacgccgacagcgtgaagggaaggttcacaatctctagggacaacgccaagaacacactgtatctgcagctgaactctctgaaggccgaggacactgccatgtactactgcgccactaataggctgcactactacagcgacgatgattctctgaggggccaaggcacacaagtgacagtctcgagcggcggaggatcccaggttcagctgcaagaatctggcggcggatctgttcaggctggcggatctctgagactgtcttgtgccgcttccggctacgagtactgcagaatccacatgacctggtacagacaaggccctggcaaagagagagagttcgtcagctccatcggctccgacggcagaaagacctacgccaattctgtgaccggcagattcaccatcagccgggacaacgccaaccacaccgtgtacctgcagatgaactccctgtctcctgaggacaccgccatgtactactgcaagaccgagtacctgtacggcctgggctgtcctgatggctctgcttattggggccagggcacccaagtgaccgtttcttctgctagccaccatcaccatcaccac

SEQ ID NO: 310 - DNA, 765 bp, Artificial Sequence; identical to SEQ ID NO: 139
  Description of Artificial Sequence: Synthetic polynucleotide

SEQ ID NO: 311 - DNA, 756 bp, Artificial Sequence
  Description of Artificial Sequence: Synthetic polynucleotide
caagtgcagctgcaagagagcggaggaggaagcgtgcaagccggcggatctctgagactcagctgtactgcctccggcttcacattcgacgatagggagatgaactggtataggcaagcccccggcaatgagtgcgagctggtgagcacaatctccagcgatggcagcacttactacgccgatagcgtgaagggaaggttcactatctcccaagataacgccaagaacacagtctatctgcagatggactccgtcaagccagaggatactgccgtgtactactgcgccgccgacttcatgatcgccatccaagcccccggcgctggctgttggggacaaggcactcaagtgacagtctcgagcggcggaggatcccaggttcagctgctggaatctggcggaggattggttcagcctggcggctctctgagactgtcttgtgctgcctctggcgacatgatcatctccgaggacatgagctgggtccgacaggctcctggcaaaggactggaatgggtgtccacaatcgcctccgacgacggctctacctactacgccgattccgtgaagggcagattcaccatcagccgggacaactccaagaacaccctgtacctgcagatgaactccctgagagccgaggacaccgccgtgtactattgtgccggcttcgatgcccaggatgccgccattgaatattggggccagggcaccctggtcaccgtttcttctgctagccaccatcaccatcaccac

SEQ ID NO: 312 - DNA, 756 bp, Artificial Sequence
  Description of Artificial Sequence: Synthetic polynucleotide
caagtgcagctgcaagagagcggaggaggaagcgtgcaagccggcggatctctgagactcagctgtactgcctccggcttcacattcgacgatagggagatgaactggtataggcaagcccccggcaatgagtgcgagctggtgagcacaatctccagcgatggcagcacttactacgccgatagcgtgaagggaaggttcactatctcccaagataacgccaagaacacagtctatctgcagatggactccgtcaagccagaggatactgccgtgtactactgcgccgccgacttcatgatcgccatccaagcccccggcgctggctgttggggacaaggcactcaagtgacagtctcgagcggcggaggatcccaggttcagctgcaagaatctggcggcggatctgttcaggctggcggatctctgagactgtcctgtgtcggctctggctacacctacgacacctccgacatgtcctggtacagacaggcccctggcaaagagagagagttcgtcagcgacatcgactccggcgattgggccgcttatgccgatgctgtgaagggcagattcaccatctctcgggacaacgccaagaaaaccgtgtacctgcagatgaactccctggaacctgaggacaccgccatgtactactgcaaggcctcctactggaagtggggcaagctgaacaacttctggggccctggcacacaagtgaccgtttcttctgctagccaccatcaccatcaccac

SEQ ID NO: 313 - DNA, 765 bp, Artificial Sequence; identical to SEQ ID NO: 140
  Description of Artificial Sequence: Synthetic polynucleotide

SEQ ID NO: 314 - DNA, 774 bp, Artificial Sequence; identical to SEQ ID NO: 141
  Description of Artificial Sequence: Synthetic polynucleotide

SEQ ID NO: 315 - DNA, 747 bp, Artificial Sequence
  Description of Artificial Sequence: Synthetic polynucleotide
caagtgcagctgcaagagagcggaggaggaagcgtgcaagccggcggatctctgagactcagctgtactgcctccggcttcacattcgacgatagggagatgaactggtataggcaagcccccggcaatgagtgcgagctggtgagcacaatctccagcgatggcagcacttactacgccgatagcgtgaagggaaggttcactatctcccaagataacgccaagaacacagtctatctgcagatggactccgtcaagccagaggatactgccgtgtactactgcgccgccgacttcatgatcgccatccaagcccccggcgctggctgttggggacaaggcactcaagtgacagtctcgagcggcggaggatcccaggttcagctgcaagagtctggcggaggattggttcagcctggcggatctctgagactgtcctgtgtggcctctggcttcaccttctccaactactggatcttctgggtccgacaggccgctggcaaaggactggaatggctgtccacctctaacaccggcggagacaccactaagtacgccgactctgtgaagggcagattcaccatctccagagacagcgccaagaacaccgagtacctgcagatgaactccctgaagcctgaggacaccgccgtgtactactgcgagacaggcagatgcgctagatccggcggctatcagggcacccaagtgacagtttcttctgctagccaccatcaccatcaccac

SEQ ID NO: 316 - DNA, 771 bp, Artificial Sequence
  Description of Artificial Sequence: Synthetic polynucleotide
caagtgcagctgcaagagagcggaggaggaagcgtgcaagccggcggatctctgagactcagctgtactgcctccggcttcacattcgacgatagggagatgaactggtataggcaagcccccggcaatgagtgcgagctggtgagcacaatctccagcgatggcagcacttactacgccgatagcgtgaagggaaggttcactatctcccaagataacgccaagaacacagtctatctgcagatggactccgtcaagccagaggatactgccgtgtactactgcgccgccgacttcatgatcgccatccaagcccccggcgctggctgttggggacaaggcactcaagtgacagtctcgagcggcggaggatcccaggttcagctgcaagaatctggcggaggctctgtgcaagtcggcggatctctgagactgtcctgtgccacctctggcgacaccaagtctatcagatgcatgggctggttccggcagacccctggcaaagagagagagggaatcgccgccatcgacagagagggctttgccacctacgccgactccgtgtacgacagattcacaatcgcccaggacaacgcccagaacaccctgtacctggaaatgaacgccctgaagcctgaggacaccgccatgtactactgcgccgctcagaacatgtgcagagtcgtgcggggagctatgaccggcgttgactattggggcaagggcacccaagtgaccgtttcttctgctagccaccatcaccatcaccac

SEQ ID NO: 317 - DNA, 774 bp, Artificial Sequence
  Description of Artificial Sequence: Synthetic polynucleotide
caagtgcagctgcaagagagcggaggaggaagcgtgcaagccggcggatctctgagactcagctgtactgcctccggcttcacattcgacgatagggagatgaactggtataggcaagcccccggcaatgagtgcgagctggtgagcacaatctccagcgatggcagcacttactacgccgatagcgtgaagggaaggttcactatctcccaagataacgccaagaacacagtctatctgcagatggactccgtcaagccagaggatactgccgtgtactactgcgccgccgacttcatgatcgccatccaagcccccggcgctggctgttggggacaaggcactcaagtgacagtctcgagcggcggaggatcccaggttcagctgcaagaatctggcggaggctctgtgcaagtcggcggatctctgaagctgtcttgtgccgcctccggctacacctactccagctactactgcatgggctggttcagacaggcccctggcaaagagagagaaggcgtcgccgccatcgactctgatggctctacctcttacgccgactccgtgaagggcagattcaccatctctcaggacgacgccaagaacaccctgtacctgcagatgaactccctgaagcctgaggacaccgccatgtactactgcgccgcttcttacgaggtggtggactgctacccttctggctacggccaggattattggggcaagggcacccaagtgaccgtttcttctgctagccaccatcaccatcaccac

SEQ ID NO: 318 - DNA, 771 bp, Artificial Sequence
  Description of Artificial Sequence: Synthetic polynucleotide
caagtgcagctgcaagagagcggaggaggaagcgtgcaagccggcggatctctgagactcagctgtactgcctccggcttcacattcgacgatagggagatgaactggtataggcaagcccccggcaatgagtgcgagctggtgagcacaatctccagcgatggcagcacttactacgccgatagcgtgaagggaaggttcactatctcccaagataacgccaagaacacagtctatctgcagatggactccgtcaagccagaggatactgccgtgtactactgcgccgccgacttcatgatcgccatccaagcccccggcgctggctgttggggacaaggcactcaagtgacagtctcgagcggcggaggatcccaggttcagctgcaagaatctggcggcggatctgttcaggctggcggatctctgagactgtcttgtgccgcctccgagtacaccgcctccagatactgtatggcctggttcagacaggcccctggcaaagagagagaaggcgtcgccgctattcatcctggcggaggcaccacctactacgccgattctgtgaagggcagattctccatcagccaggactccgccgacaacaccctgtacctgcagatgaactccctgaagcctgaggacaccgccatgtactactgtgccgctggatctctgtgggtgcccttcggcgatagatgtgccgctaattattggggccagggcacacaagtgaccgtttcttctgctagccaccatcaccatcaccac

SEQ ID NO: 319 - DNA, 765 bp, Artificial Sequence
  Description of Artificial Sequence: Synthetic polynucleotide
caagtgcagctgcaagagagcggaggaggaagcgtgcaagccggcggatctctgagactcagctgtactgcctccggcttcacattcgacgatagggagatgaactggtataggcaagcccccggcaatgagtgcgagctggtgagcacaatctccagcgatggcagcacttactacgccgatagcgtgaagggaaggttcactatctcccaagataacgccaagaacacagtctatctgcagatggactccgtcaagccagaggatactgccgtgtactactgcgccgccgacttcatgatcgccatccaagcccccggcgctggctgttggggacaaggcactcaagtgacagtctcgagcggcggaggatcccaggttcagctgcaagaatctggcggcggatctgttcaggctggcggatctctgagactgtcttgtgccgcttccggctacgagtactgcagaatccacatgacctggtacagacaaggccctggcaaagagagagagttcgtcagctccatcggctccgacggcagaaagacctacgccaattctgtgaccggcagattcaccatcagccgggacaacgccaaccacaccgtgtacctgcagatgaactccctgtctcctgaggacaccgccatgtactactgcaagaccgagtacctgtacggcctgggctgtcctgatggctctgcttattggggccagggcacccaagtgaccgtttcttctgctagccaccatcaccatcaccac

SEQ ID NO: 320 - DNA, 759 bp, Artificial Sequence
  Description of Artificial Sequence: Synthetic polynucleotide
caagtgcagctgcaagagagcggaggaggcagcgtgcaagccggaggctctctgagactgagctgtgtggccagcggctacacaagctgcatgggctggtttaggcaagcccccggcaaggagagagaggccgtggccacaatctacactaggggaaggagcatctactacgccgacagcgtgaaaggaaggttcacaatcagccaagataacgccaagaacactctgtatctgcagatgaacagcctcaagccagaggacatcgccatgtatagctgtgctgctggcggctatagctggagcgctggctgcgagttcaattactggggccaaggcacacaagtgactgtctcgagcggcggaggatcccaggttcagctgctggaatctggcggaggattggttcagcctggcggctctctgagactgtcttgtgctgcttctggcgtgcggatcagcacccaggatatgagctgggtccgacaggctcctggcaaaggactggaatgggtgtcctccatcctgacacctaacggctccacctactacgccgactccgtgaagggcagattcaccatctctcgggacaactccaagaacaccctgtacctgcagatgaactccctgagagccgaggacaccgccgtgtactattgtgctggcgtggacgagagatgcgaggccgaggatcagatcgattattggggccagggcaccctggtcaccgtttcttctgctagccaccatcaccatcaccac

SEQ ID NO: 321 - DNA, 750 bp, Artificial Sequence
  Description of Artificial Sequence: Synthetic polynucleotide
caagtgcagctgcaagagagcggaggaggcagcgtgcaagccggaggctctctgagactgagctgtgtggccagcggctacacaagctgcatgggctggtttaggcaagcccccggcaaggagagagaggccgtggccacaatctacactaggggaaggagcatctactacgccgacagcgtgaaaggaaggttcacaatcagccaagataacgccaagaacactctgtatctgcagatgaacagcctcaagccagaggacatcgccatgtatagctgtgctgctggcggctatagctggagcgctggctgcgagttcaattactggggccaaggcacacaagtgactgtctcgagcggcggaggatcccaggttcagctgctggaatctggcggaggattggttcagcctggcggctctctgagactgtcttgtgctgcctctggcgacatgatcatctccgaggacatgagctgggtccgacaggctcctggcaaaggactggaatgggtgtccacaatcgcctccgacgacggctctacctactacgccgattccgtgaagggcagattcaccatcagccgggacaactccaagaacaccctgtacctgcagatgaactccctgagagccgaggacaccgccgtgtactattgtgccggcttcgatgcccaggatgccgccattgaatattggggccagggcaccctggtcaccgtttcttctgctagccaccatcaccatcaccac

SEQ ID NO: 322 - DNA, 750 bp, Artificial Sequence
  Description of Artificial Sequence: Synthetic polynucleotide
caagtgcagctgcaagagagcggaggaggcagcgtgcaagccggaggctctctgagactgagctgtgtggccagcggctacacaagctgcatgggctggtttaggcaagcccccggcaaggagagagaggccgtggccacaatctacactaggggaaggagcatctactacgccgacagcgtgaaaggaaggttcacaatcagccaagataacgccaagaacactctgtatctgcagatgaacagcctcaagccagaggacatcgccatgtatagctgtgctgctggcggctatagctggagcgctggctgcgagttcaattactggggccaaggcacacaagtgactgtctcgagcggcggaggatcccaggttcagctgcaagaatctggcggcggatctgttcaggctggcggatctctgagactgtcctgtgtcggctctggctacacctacgacacctccgacatgtcctggtacagacaggcccctggcaaagagagagagttcgtcagcgacatcgactccggcgattgggccgcttatgccgatgctgtgaagggcagattcaccatctctcgggacaacgccaagaaaaccgtgtacctgcagatgaactccctggaacctgaggacaccgccatgtactactgcaaggcctcctactggaagtggggcaagctgaacaacttctggggccctggcacacaagtgaccgtttcttctgctagccaccatcaccatcaccac

SEQ ID NO: 323 - DNA, 759 bp, Artificial Sequence
  Description of Artificial Sequence: Synthetic polynucleotide
caagtgcagctgcaagagagcggaggaggcagcgtgcaagccggaggctctctgagactgagctgtgtggccagcggctacacaagctgcatgggctggtttaggcaagcccccggcaaggagagagaggccgtggccacaatctacactaggggaaggagcatctactacgccgacagcgtgaaaggaaggttcacaatcagccaagataacgccaagaacactctgtatctgcagatgaacagcctcaagccagaggacatcgccatgtatagctgtgctgctggcggctatagctggagcgctggctgcgagttcaattactggggccaaggcacacaagtgactgtctcgagcggcggaggatcccaggttcagctgcaagagtctggcggaggattggttcagcctggcggatctctgaagctgtcttgtgccgcctccggcttccggttctctaactacggaatgtcctgggtccgacaggctcctggcgaaggacttgagtgggtgtcctacatcaacggcgacggcagcagaacccactacgccgattctgtgaagggcagattcaccatcagccgggacaacgccaagaacaccctgtacctgcagctcaactccctgaaaaccgaggacaccgccatgtactactgcgagaagggcctgtccagagatggctggtcactgtctgctgcttctagaggccagggcacccaagtgacagtttcttctgctagccaccatcaccatcaccac

SEQ ID NO: 324 - DNA, 768 bp, Artificial Sequence
  Description of Artificial Sequence: Synthetic polynucleotide
caagtgcagctgcaagagagcggaggaggcagcgtgcaagccggaggctctctgagactgagctgtgtggccagcggctacacaagctgcatgggctggtttaggcaagcccccggcaaggagagagaggccgtggccacaatctacactaggggaaggagcatctactacgccgacagcgtgaaaggaaggttcacaatcagccaagataacgccaagaacactctgtatctgcagatgaacagcctcaagccagaggacatcgccatgtatagctgtgctgctggcggctatagctggagcgctggctgcgagttcaattactggggccaaggcacacaagtgactgtctcgagcggcggaggatcccaggttcagctgcaagaatctggcggcggatctgttcagacaggcggctctctgagactgtcctgtgctgtgtccggctacaccacctacagcttcaactacatgggctggttcaggcaggcccctggcaaagaacgagaaggcgtggccgtgatctataccggcggaggctctaccctgtacgccgactctgtgaagggcagattcaccatcagccaggacaacgccaagaacaccgtgtacctgcagatgaactccctgaagcctgaggacaccgccatgtactactgtgccgccgacgaccagagattcgcctctcctctgtacgcctacttcggctattggggccagggcacccaagtgacagtttcttctgctagccaccatcaccatcaccac

SEQ ID NO: 325 - DNA, 741 bp, Artificial Sequence
  Description of Artificial Sequence: Synthetic polynucleotide
caagtgcagctgcaagagagcggaggaggcagcgtgcaagccggaggctctctgagactgagctgtgtggccagcggctacacaagctgcatgggctggtttaggcaagcccccggcaaggagagagaggccgtggccacaatctacactaggggaaggagcatctactacgccgacagcgtgaaaggaaggttcacaatcagccaagataacgccaagaacactctgtatctgcagatgaacagcctcaagccagaggacatcgccatgtatagctgtgctgctggcggctatagctggagcgctggctgcgagttcaattactggggccaaggcacacaagtgactgtctcgagcggcggaggatcccaggttcagctgcaagagtctggcggaggattggttcagcctggcggatctctgagactgtcctgtgtggcctctggcttcaccttctccaactactggatcttctgggtccgacaggccgctggcaaaggactggaatggctgtccacctctaacaccggcggagacaccactaagtacgccgactctgtgaagggcagattcaccatctccagagacagcgccaagaacaccgagtacctgcagatgaactccctgaagcctgaggacaccgccgtgtactactgcgagacaggcagatgcgctagatccggcggctatcagggcacccaagtgacagtttcttctgctagccaccatcaccatcaccac

SEQ ID NO: 326 - DNA, 765 bp, Artificial Sequence
  Description of Artificial Sequence: Synthetic polynucleotide
caagtgcagctgcaagagagcggaggaggcagcgtgcaagccggaggctctctgagactgagctgtgtggccagcggctacacaagctgcatgggctggtttaggcaagcccccggcaaggagagagaggccgtggccacaatctacactaggggaaggagcatctactacgccgacagcgtgaaaggaaggttcacaatcagccaagataacgccaagaacactctgtatctgcagatgaacagcctcaagccagaggacatcgccatgtatagctgtgctgctggcggctatagctggagcgctggctgcgagttcaattactggggccaaggcacacaagtgactgtctcgagcggcggaggatcccaggttcagctgcaagaatctggcggaggctctgtgcaagtcggcggatctctgagactgtcctgtgccacctctggcgacaccaagtctatcagatgcatgggctggttccggcagacccctggcaaagagagagagggaatcgccgccatcgacagagagggctttgccacctacgccgactccgtgtacgacagattcacaatcgcccaggacaacgcccagaacaccctgtacctggaaatgaacgccctgaagcctgaggacaccgccatgtactactgcgccgctcagaacatgtgcagagtcgtgcggggagctatgaccggcgttgactattggggcaagggcacccaagtgaccgtttcttctgctagccaccatcaccatcaccac

SEQ ID NO: 327 - DNA, 768 bp, Artificial Sequence
  Description of Artificial Sequence: Synthetic polynucleotide
caagtgcagctgcaagagagcggaggaggcagcgtgcaagccggaggctctctgagactgagctgtgtggccagcggctacacaagctgcatgggctggtttaggcaagcccccggcaaggagagagaggccgtggccacaatctacactaggggaaggagcatctactacgccgacagcgtgaaaggaaggttcacaatcagccaagataacgccaagaacactctgtatctgcagatgaacagcctcaagccagaggacatcgccatgtatagctgtgctgctggcggctatagctggagcgctggctgcgagttcaattactggggccaaggcacacaagtgactgtctcgagcggcggaggatcccaggttcagctgcaagaatctggcggaggctctgtgcaagtcggcggatctctgaagctgtcttgtgccgcctccggctacacctactccagctactactgcatgggctggttcagacaggcccctggcaaagagagagaaggcgtcgccgccatcgactctgatggctctacctcttacgccgactccgtgaagggcagattcaccatctctcaggacgacgccaagaacaccctgtacctgcagatgaactccctgaagcctgaggacaccgccatgtactactgcgccgcttcttacgaggtggtggactgctacccttctggctacggccaggattattggggcaagggcacccaagtgaccgtttcttctgctagccaccatcaccatcaccac

SEQ ID NO: 328 - DNA, 765 bp, Artificial Sequence
  Description of Artificial Sequence: Synthetic polynucleotide
caagtgcagctgcaagagagcggaggaggcagcgtgcaagccggaggctctctgagactgagctgtgtggccagcggctacacaagctgcatgggctggtttaggcaagcccccggcaaggagagagaggccgtggccacaatctacactaggggaaggagcatctactacgccgacagcgtgaaaggaaggttcacaatcagccaagataacgccaagaacactctgtatctgcagatgaacagcctcaagccagaggacatcgccatgtatagctgtgctgctggcggctatagctggagcgctggctgcgagttcaattactggggccaaggcacacaagtgactgtctcgagcggcggaggatcccaggttcagctgcaagaatctggcggcggatctgttcaggctggcggatctctgagactgtcttgtgccgcctccgagtacaccgcctccagatactgtatggcctggttcagacaggcccctggcaaagagagagaaggcgtcgccgctattcatcctggcggaggcaccacctactacgccgattctgtgaagggcagattctccatcagccaggactccgccgacaacaccctgtacctgcagatgaactccctgaagcctgaggacaccgccatgtactactgtgccgctggatctctgtgggtgcccttcggcgatagatgtgccgctaattattggggccagggcacacaagtgaccgtttcttctgctagccaccatcaccatcaccac

SEQ ID NO: 329 - DNA, 759 bp, Artificial Sequence; identical to SEQ ID NO: 142
  Description of Artificial Sequence: Synthetic polynucleotide

SEQ ID NO: 330 - DNA, 777 bp, Artificial Sequence; identical to SEQ ID NO: 143
  Description of Artificial Sequence: Synthetic polynucleotide

SEQ ID NO: 331 - DNA, 768 bp, Artificial Sequence; identical to SEQ ID NO: 144
  Description of Artificial Sequence: Synthetic polynucleotide

SEQ ID NO: 332 - DNA, 768 bp, Artificial Sequence; identical to SEQ ID NO: 145
  Description of Artificial Sequence: Synthetic polynucleotide

SEQ ID NO: 333 - DNA, 777 bp, Artificial Sequence; identical to SEQ ID NO: 146
  Description of Artificial Sequence: Synthetic polynucleotide

SEQ ID NO: 334 - DNA, 786 bp, Artificial Sequence; identical to SEQ ID NO: 147
  Description of Artificial Sequence: Synthetic polynucleotide

SEQ ID NO: 335 - DNA, 759 bp, Artificial Sequence
  Description of Artificial Sequence: Synthetic polynucleotide
caagtgcagctgcaagagagcggaggcggaagcgtgcaagctggaggatctctgaggctgagctgcacagccagcggcttcactttcgatgacagcgacatgggctggtataggcaagcccccggcaatgagtgtgagctggtgagcacaatcagcagcgacggctccacttactacgccgacagcgtcaagggaaggttcacaatcagccaagataacgccaagaacactgtgtatctgcagatgaactctctgaagccagaggacacagccgtgtactactgtgctgccgagcctaggggctactatagcaactacggcggaaggagggagtgcaattactggggccaaggcacacaagtgacagtctcgagcggcggaggatcccaggttcagctgcaagagtctggcggaggattggttcagcctggcggatctctgagactgtcctgtgtggcctctggcttcaccttctccaactactggatcttctgggtccgacaggccgctggcaaaggactggaatggctgtccacctctaacaccggcggagacaccactaagtacgccgactctgtgaagggcagattcaccatctccagagacagcgccaagaacaccgagtacctgcagatgaactccctgaagcctgaggacaccgccgtgtactactgcgagacaggcagatgcgctagatccggcggctatcagggcacccaagtgacagtttcttctgctagccaccatcaccatcaccac

SEQ ID NO: 336 - DNA, 783 bp, Artificial Sequence; identical to SEQ ID NO: 148
  Description of Artificial Sequence: Synthetic polynucleotide

SEQ ID NO: 337 - DNA, 786 bp, Artificial Sequence; identical to SEQ ID NO: 149
  Description of Artificial Sequence: Synthetic polynucleotide

SEQ ID NO: 338 - DNA, 783 bp, Artificial Sequence; identical to SEQ ID NO: 150
  Description of Artificial Sequence: Synthetic polynucleotide

SEQ ID NO: 339 - DNA, 777 bp, Artificial Sequence; identical to SEQ ID NO: 151
  Description of Artificial Sequence: Synthetic polynucleotide

SEQ ID NO: 340 - DNA, 783 bp, Artificial Sequence; identical to SEQ ID NO: 152
  Description of Artificial Sequence: Synthetic polynucleotide

SEQ ID NO: 341 - DNA, 774 bp, Artificial Sequence
  Description of Artificial Sequence: Synthetic polynucleotide
caagtgcagctgcaagagagcggaggaggaagcgtgcaagccggaggctctctgaggctgagctgtgtggccagcggctacactttcagcagctactgcatgggctggttcagacaagcccccggcaaggaaagggaaggagtggccgctctgggcggaggaagcacatactacgctgacagcgtgaagggaaggttcacaatcagccaagataacgccaagaacacactgtatctgcagatgaactctctgaagccagaggacacagccatgtactactgtgccgctgcttgggtcgcttgtctggagttcggcggcagctggtacgatctggctaggtacaagcactggggccaaggcacacaagtgacagtctcgagcggcggaggatcccaggttcagctgctggaatctggcggaggattggttcagcctggcggctctctgagactgtcttgtgctgcctctggcgacatgatcatctccgaggacatgagctgggtccgacaggctcctggcaaaggactggaatgggtgtccacaatcgcctccgacgacggctctacctactacgccgattccgtgaagggcagattcaccatcagccgggacaactccaagaacaccctgtacctgcagatgaactccctgagagccgaggacaccgccgtgtactattgtgccggcttcgatgcccaggatgccgccattgaatattggggccagggcaccctggtcaccgtttcttctgctagccaccatcaccatcaccac

SEQ ID NO: 342 - DNA, 774 bp, Artificial Sequence
  Description of Artificial Sequence: Synthetic polynucleotide
caagtgcagctgcaagagagcggaggaggaagcgtgcaagccggaggctctctgaggctgagctgtgtggccagcggctacactttcagcagctactgcatgggctggttcagacaagcccccggcaaggaaagggaaggagtggccgctctgggcggaggaagcacatactacgctgacagcgtgaagggaaggttcacaatcagccaagataacgccaagaacacactgtatctgcagatgaactctctgaagccagaggacacagccatgtactactgtgccgctgcttgggtcgcttgtctggagttcggcggcagctggtacgatctggctaggtacaagcactggggccaaggcacacaagtgacagtctcgagcggcggaggatcccaggttcagctgcaagaatctggcggcggatctgttcaggctggcggatctctgagactgtcctgtgtcggctctggctacacctacgacacctccgacatgtcctggtacagacaggcccctggcaaagagagagagttcgtcagcgacatcgactccggcgattgggccgcttatgccgatgctgtgaagggcagattcaccatctctcgggacaacgccaagaaaaccgtgtacctgcagatgaactccctggaacctgaggacaccgccatgtactactgcaaggcctcctactggaagtggggcaagctgaacaacttctggggccctggcacacaagtgaccgtttcttctgctagccaccatcaccatcaccac

SEQ ID NO: 343 - DNA, 783 bp, Artificial Sequence
  Description of Artificial Sequence: Synthetic polynucleotide
caagtgcagctgcaagagagcggaggaggaagcgtgcaagccggaggctctctgaggctgagctgtgtggccagcggctacactttcagcagctactgcatgggctggttcagacaagcccccggcaaggaaagggaaggagtggccgctctgggcggaggaagcacatactacgctgacagcgtgaagggaaggttcacaatcagccaagataacgccaagaacacactgtatctgcagatgaactctctgaagccagaggacacagccatgtactactgtgccgctgcttgggtcgcttgtctggagttcggcggcagctggtacgatctggctaggtacaagcactggggccaaggcacacaagtgacagtctcgagcggcggaggatcccaggttcagctgcaagagtctggcggaggattggttcagcctggcggatctctgaagctgtcttgtgccgcctccggcttccggttctctaactacggaatgtcctgggtccgacaggctcctggcgaaggacttgagtgggtgtcctacatcaacggcgacggcagcagaacccactacgccgattctgtgaagggcagattcaccatcagccgggacaacgccaagaacaccctgtacctgcagctcaactccctgaaaaccgaggacaccgccatgtactactgcgagaagggcctgtccagagatggctggtcactgtctgctgcttctagaggccagggcacccaagtgacagtttcttctgctagccaccatcaccatcaccac

SEQ ID NO: 344 - DNA, 792 bp, Artificial Sequence
  Description of Artificial Sequence: Synthetic polynucleotide
caagtgcagctgcaagagagcggaggaggaagcgtgcaagccggaggctctctgaggctgagctgtgtggccagcggctacactttcagcagctactgcatgggctggttcagacaagcccccggcaaggaaagggaaggagtggccgctctgggcggaggaagcacatactacgctgacagcgtgaagggaaggttcacaatcagccaagataacgccaagaacacactgtatctgcagatgaactctctgaagccagaggacacagccatgtactactgtgccgctgcttgggtcgcttgtctggagttcggcggcagctggtacgatctggctaggtacaagcactggggccaaggcacacaagtgacagtctcgagcggcggaggatcccaggttcagctgcaagaatctggcggcggatctgttcagacaggcggctctctgagactgtcctgtgctgtgtccggctacaccacctacagcttcaactacatgggctggttcaggcaggcccctggcaaagaacgagaaggcgtggccgtgatctataccggcggaggctctaccctgtacgccgactctgtgaagggcagattcaccatcagccaggacaacgccaagaacaccgtgtacctgcagatgaactccctgaagcctgaggacaccgccatgtactactgtgccgccgacgaccagagattcgcctctcctctgtacgcctacttcggctattggggccagggcacccaagtgacagtttcttctgctagccaccatcaccatcaccac

SEQ ID NO: 345 - DNA, 765 bp, Artificial Sequence
  Description of Artificial Sequence: Synthetic polynucleotide
caagtgcagctgcaagagagcggaggaggaagcgtgcaagccggaggctctctgaggctgagctgtgtggccagcggctacactttcagcagctactgcatgggctggttcagacaagcccccggcaaggaaagggaaggagtggccgctctgggcggaggaagcacatactacgctgacagcgtgaagggaaggttcacaatcagccaagataacgccaagaacacactgtatctgcagatgaactctctgaagccagaggacacagccatgtactactgtgccgctgcttgggtcgcttgtctggagttcggcggcagctggtacgatctggctaggtacaagcactggggccaaggcacacaagtgacagtctcgagcggcggaggatcccaggttcagctgcaagagtctggcggaggattggttcagcctggcggatctctgagactgtcctgtgtggcctctggcttcaccttctccaactactggatcttctgggtccgacaggccgctggcaaaggactggaatggctgtccacctctaacaccggcggagacaccactaagtacgccgactctgtgaagggcagattcaccatctccagagacagcgccaagaacaccgagtacctgcagatgaactccctgaagcctgaggacaccgccgtgtactactgcgagacaggcagatgcgctagatccggcggctatcagggcacccaagtgacagtttcttctgctagccaccatcaccatcaccac

SEQ ID NO: 346 - DNA, 789 bp, Artificial Sequence; identical to SEQ ID NO: 153
  Description of Artificial Sequence: Synthetic polynucleotide

SEQ ID NO: 347 - DNA, 792 bp, Artificial Sequence
  Description of Artificial Sequence: Synthetic polynucleotide
caagtgcagctgcaagagagcggaggaggaagcgtgcaagccggaggctctctgaggctgagctgtgtggccagcggctacactttcagcagctactgcatgggctggttcagacaagcccccggcaaggaaagggaaggagtggccgctctgggcggaggaagcacatactacgctgacagcgtgaagggaaggttcacaatcagccaagataacgccaagaacacactgtatctgcagatgaactctctgaagccagaggacacagccatgtactactgtgccgctgcttgggtcgcttgtctggagttcggcggcagctggtacgatctggctaggtacaagcactggggccaaggcacacaagtgacagtctcgagcggcggaggatcccaggttcagctgcaagaatctggcggaggctctgtgcaagtcggcggatctctgaagctgtcttgtgccgcctccggctacacctactccagctactactgcatgggctggttcagacaggcccctggcaaagagagagaaggcgtcgccgccatcgactctgatggctctacctcttacgccgactccgtgaagggcagattcaccatctctcaggacgacgccaagaacaccctgtacctgcagatgaactccctgaagcctgaggacaccgccatgtactactgcgccgcttcttacgaggtggtggactgctacccttctggctacggccaggattattggggcaagggcacccaagtgaccgtttcttctgctagccaccatcaccatcaccac

SEQ ID NO: 348 - DNA, 789 bp, Artificial Sequence
  Description of Artificial Sequence: Synthetic polynucleotide
caagtgcagctgcaagagagcggaggaggaagcgtgcaagccggaggctctctgaggctgagctgtgtggccagcggctacactttcagcagctactgcatgggctggttcagacaagcccccggcaaggaaagggaaggagtggccgctctgggcggaggaagcacatactacgctgacagcgtgaagggaaggttcacaatcagccaagataacgccaagaacacactgtatctgcagatgaactctctgaagccagaggacacagccatgtactactgtgccgctgcttgggtcgcttgtctggagttcggcggcagctggtacgatctggctaggtacaagcactggggccaaggcacacaagtgacagtctcgagcggcggaggatcccaggttcagctgcaagaatctggcggcggatctgttcaggctggcggatctctgagactgtcttgtgccgcctccgagtacaccgcctccagatactgtatggcctggttcagacaggcccctggcaaagagagagaaggcgtcgccgctattcatcctggcggaggcaccacctactacgccgattctgtgaagggcagattctccatcagccaggactccgccgacaacaccctgtacctgcagatgaactccctgaagcctgaggacaccgccatgtactactgtgccgctggatctctgtgggtgcccttcggcgatagatgtgccgctaattattggggccagggcacacaagtgaccgtttcttctgctagccaccatcaccatcaccac

SEQ ID NO: 349 - DNA, 783 bp, Artificial Sequence
  Description of Artificial Sequence: Synthetic polynucleotide
caagtgcagctgcaagagagcggaggaggaagcgtgcaagccggaggctctctgaggctgagctgtgtggccagcggctacactttcagcagctactgcatgggctggttcagacaagcccccggcaaggaaagggaaggagtggccgctctgggcggaggaagcacatactacgctgacagcgtgaagggaaggttcacaatcagccaagataacgccaagaacacactgtatctgcagatgaactctctgaagccagaggacacagccatgtactactgtgccgctgcttgggtcgcttgtctggagttcggcggcagctggtacgatctggctaggtacaagcactggggccaaggcacacaagtgacagtctcgagcggcggaggatcccaggttcagctgcaagaatctggcggcggatctgttcaggctggcggatctctgagactgtcttgtgccgcttccggctacgagtactgcagaatccacatgacctggtacagacaaggccctggcaaagagagagagttcgtcagctccatcggctccgacggcagaaagacctacgccaattctgtgaccggcagattcaccatcagccgggacaacgccaaccacaccgtgtacctgcagatgaactccctgtctcctgaggacaccgccatgtactactgcaagaccgagtacctgtacggcctgggctgtcctgatggctctgcttattggggccagggcacccaagtgaccgtttcttctgctagccaccatcaccatcaccac

SEQ ID NO: 350 - DNA, 753 bp, Artificial Sequence
  Description of Artificial Sequence: Synthetic polynucleotide
caggttcagctgctggaatctggcggaggattggttcagcctggcggctctctgagactgtcttgtgctgcttctggcgtgcggatcagcacccaggatatgagctgggtccgacaggctcctggcaaaggactggaatgggtgtcctccatcctgacacctaacggctccacctactacgccgactccgtgaagggcagattcaccatctctcgggacaactccaagaacaccctgtacctgcagatgaactccctgagagccgaggacaccgccgtgtactattgtgctggcgtggacgagagatgcgaggccgaggatcagatcgattattggggccagggcaccctggtcaccgtctcgagcggcggaggatcccaagtgcagctgcaagagagcggaggaggactggtccagcccggcggctctctgaggctgagctgcactgcttccggcttcagcttcagcagctaccctatgacatgggctaggcaagcccccggcaaaggactggaatgggtgagcactattgccagcgatggaggcagcacagcctacgctgccagcgtggagggaaggttcacaatctctagggacaatgccaagagcacactgtatctgcagctgaactctctgaagacagaggacactgccatgtactactgcactaagggctacggcgatggcacaccagctcccggccaaggcacacaagtgactgtttcttctgctagccaccatcaccatcaccac

SEQ ID NO: 351 - DNA, 762 bp, Artificial Sequence
  Description of Artificial Sequence: Synthetic polynucleotide
caggttcagctgctggaatctggcggaggattggttcagcctggcggctctctgagactgtcttgtgctgcttctggcgtgcggatcagcacccaggatatgagctgggtccgacaggctcctggcaaaggactggaatgggtgtcctccatcctgacacctaacggctccacctactacgccgactccgtgaagggcagattcaccatctctcgggacaactccaagaacaccctgtacctgcagatgaactccctgagagccgaggacaccgccgtgtactattgtgctggcgtggacgagagatgcgaggccgaggatcagatcgattattggggccagggcaccctggtcaccgtctcgagcggcggaggatcccaagtgcagctgcaagagagcggaggaggactggtgcagcccggcggctctctgaggctgagctgtgctgccagcggcttcactttcagcagcgctcacatgagctgggtgaggcaagcccccggcaaaggaagggagtggatcgcctccatctacagcggcggcggaacattctacgccgacagcgtgaagggaaggttcacaatctctagggacaacgccaagaacacactgtatctgcagctgaactctctgaaggccgaggacactgccatgtactactgcgccactaataggctgcactactacagcgacgatgattctctgaggggccaaggcacacaagtgacagtttcttctgctagccaccatcaccatcaccac

SEQ ID NO: 352 - DNA, 765 bp, Artificial Sequence
  Description of Artificial Sequence: Synthetic polynucleotide
caggttcagctgctggaatctggcggaggattggttcagcctggcggctctctgagactgtcttgtgctgcttctggcgtgcggatcagcacccaggatatgagctgggtccgacaggctcctggcaaaggactggaatgggtgtcctccatcctgacacctaacggctccacctactacgccgactccgtgaagggcagattcaccatctctcgggacaactccaagaacaccctgtacctgcagatgaactccctgagagccgaggacaccgccgtgtactattgtgctggcgtggacgagagatgcgaggccgaggatcagatcgattattggggccagggcaccctggtcaccgtctcgagcggcggaggatcccaagtgcagctgcaagagagcggaggaggaagcgtgcaagccggcggatctctgagactcagctgtactgcctccggcttcacattcgacgatagggagatgaactggtataggcaagcccccggcaatgagtgcgagctggtgagcacaatctccagcgatggcagcacttactacgccgatagcgtgaagggaaggttcactatctcccaagataacgccaagaacacagtctatctgcagatggactccgtcaagccagaggatactgccgtgtactactgcgccgccgacttcatgatcgccatccaagcccccggcgctggctgttggggacaaggcactcaagtgacagtttcttctgctagccaccatcaccatcaccac

SEQ ID NO: 353 - DNA, 759 bp, Artificial Sequence
  Description of Artificial Sequence: Synthetic polynucleotide
caggttcagctgctggaatctggcggaggattggttcagcctggcggctctctgagactgtcttgtgctgcttctggcgtgcggatcagcacccaggatatgagctgggtccgacaggctcctggcaaaggactggaatgggtgtcctccatcctgacacctaacggctccacctactacgccgactccgtgaagggcagattcaccatctctcgggacaactccaagaacaccctgtacctgcagatgaactccctgagagccgaggacaccgccgtgtactattgtgctggcgtggacgagagatgcgaggccgaggatcagatcgattattggggccagggcaccctggtcaccgtctcgagcggcggaggatcccaagtgcagctgcaagagagcggaggaggcagcgtgcaagccggaggctctctgagactgagctgtgtggccagcggctacacaagctgcatgggctggtttaggcaagcccccggcaaggagagagaggccgtggccacaatctacactaggggaaggagcatctactacgccgacagcgtgaaaggaaggttcacaatcagccaagataacgccaagaacactctgtatctgcagatgaacagcctcaagccagaggacatcgccatgtatagctgtgctgctggcggctatagctggagcgctggctgcgagttcaattactggggccaaggcacacaagtgactgtttcttctgctagccaccatcaccatcaccac

SEQ ID NO: 354 - DNA, 777 bp, Artificial Sequence; identical to SEQ ID NO: 154
  Description of Artificial Sequence: Synthetic polynucleotide

SEQ ID NO: 355 - DNA, 783 bp, Artificial Sequence
  Description of Artificial Sequence: Synthetic polynucleotide
caggttcagctgctggaatctggcggaggattggttcagcctggcggctctctgagactgtcttgtgctgcttctggcgtgcggatcagcacccaggatatgagctgggtccgacaggctcctggcaaaggactggaatgggtgtcctccatcctgacacctaacggctccacctactacgccgactccgtgaagggcagattcaccatctctcgggacaactccaagaacaccctgtacctgcagatgaactccctgagagccgaggacaccgccgtgtactattgtgctggcgtggacgagagatgcgaggccgaggatcagatcgattattggggccagggcaccctggtcaccgtctcgagcggcggaggatcccaagtgcagctgcaagagagcggaggaggaagcgtgcaagccggaggctctctgaggctgagctgtgtggccagcggctacactttcagcagctactgcatgggctggttcagacaagcccccggcaaggaaagggaaggagtggccgctctgggcggaggaagcacatactacgctgacagcgtgaagggaaggttcacaatcagccaagataacgccaagaacacactgtatctgcagatgaactctctgaagccagaggacacagccatgtactactgtgccgctgcttgggtcgcttgtctggagttcggcggcagctggtacgatctggctaggtacaagcactggggccaaggcacacaagtgacagtttcttctgctagccaccatcaccatcaccac

SEQ ID NO: 356 - DNA, 744 bp, Artificial Sequence
  Description of Artificial Sequence: Synthetic polynucleotide
caggttcagctgctggaatctggcggaggattggttcagcctggcggctctctgagactgtcttgtgctgcctctggcgacatgatcatctccgaggacatgagctgggtccgacaggctcctggcaaaggactggaatgggtgtccacaatcgcctccgacgacggctctacctactacgccgattccgtgaagggcagattcaccatcagccgggacaactccaagaacaccctgtacctgcagatgaactccctgagagccgaggacaccgccgtgtactattgtgccggcttcgatgcccaggatgccgccattgaatattggggccagggcaccctggtcaccgtctcgagcggcggaggatcccaagtgcagctgcaagagagcggaggaggactggtccagcccggcggctctctgaggctgagctgcactgcttccggcttcagcttcagcagctaccctatgacatgggctaggcaagcccccggcaaaggactggaatgggtgagcactattgccagcgatggaggcagcacagcctacgctgccagcgtggagggaaggttcacaatctctagggacaatgccaagagcacactgtatctgcagctgaactctctgaagacagaggacactgccatgtactactgcactaagggctacggcgatggcacaccagctcccggccaaggcacacaagtgactgtttcttctgctagccaccatcaccatcaccac

SEQ ID NO: 357 - DNA, 753 bp, Artificial Sequence
  Description of Artificial Sequence: Synthetic polynucleotide
caggttcagctgctggaatctggcggaggattggttcagcctggcggctctctgagactgtcttgtgctgcctctggcgacatgatcatctccgaggacatgagctgggtccgacaggctcctggcaaaggactggaatgggtgtccacaatcgcctccgacgacggctctacctactacgccgattccgtgaagggcagattcaccatcagccgggacaactccaagaacaccctgtacctgcagatgaactccctgagagccgaggacaccgccgtgtactattgtgccggcttcgatgcccaggatgccgccattgaatattggggccagggcaccctggtcaccgtctcgagcggcggaggatcccaagtgcagctgcaagagagcggaggaggactggtgcagcccggcggctctctgaggctgagctgtgctgccagcggcttcactttcagcagcgctcacatgagctgggtgaggcaagcccccggcaaaggaagggagtggatcgcctccatctacagcggcggcggaacattctacgccgacagcgtgaagggaaggttcacaatctctagggacaacgccaagaacacactgtatctgcagctgaactctctgaaggccgaggacactgccatgtactactgcgccactaataggctgcactactacagcgacgatgattctctgaggggccaaggcacacaagtgacagtttcttctgctagccaccatcaccatcaccac

SEQ ID NO: 358 - DNA, 756 bp, Artificial Sequence
  Description of Artificial Sequence: Synthetic polynucleotide
caggttcagctgctggaatctggcggaggattggttcagcctggcggctctctgagactgtcttgtgctgcctctggcgacatgatcatctccgaggacatgagctgggtccgacaggctcctggcaaaggactggaatgggtgtccacaatcgcctccgacgacggctctacctactacgccgattccgtgaagggcagattcaccatcagccgggacaactccaagaacaccctgtacctgcagatgaactccctgagagccgaggacaccgccgtgtactattgtgccggcttcgatgcccaggatgccgccattgaatattggggccagggcaccctggtcaccgtctcgagcggcggaggatcccaagtgcagctgcaagagagcggaggaggaagcgtgcaagccggcggatctctgagactcagctgtactgcctccggcttcacattcgacgatagggagatgaactggtataggcaagcccccggcaatgagtgcgagctggtgagcacaatctccagcgatggcagcacttactacgccgatagcgtgaagggaaggttcactatctcccaagataacgccaagaacacagtctatctgcagatggactccgtcaagccagaggatactgccgtgtactactgcgccgccgacttcatgatcgccatccaagcccccggcgctggctgttggggacaaggcactcaagtgacagtttcttctgctagccaccatcaccatcaccac

SEQ ID NO: 359 - DNA, 750 bp, Artificial Sequence; identical to SEQ ID NO: 155
  Description of Artificial Sequence: Synthetic polynucleotide

SEQ ID NO: 360 - DNA, 768 bp, Artificial Sequence
  Description of Artificial Sequence: Synthetic polynucleotide
caggttcagctgctggaatctggcggaggattggttcagcctggcggctctctgagactgtcttgtgctgcctctggcgacatgatcatctccgaggacatgagctgggtccgacaggctcctggcaaaggactggaatgggtgtccacaatcgcctccgacgacggctctacctactacgccgattccgtgaagggcagattcaccatcagccgggacaactccaagaacaccctgtacctgcagatgaactccctgagagccgaggacaccgccgtgtactattgtgccggcttcgatgcccaggatgccgccattgaatattggggccagggcaccctggtcaccgtctcgagcggcggaggatcccaagtgcagctgcaagagagcggaggcggaagcgtgcaagctggaggatctctgaggctgagctgcacagccagcggcttcactttcgatgacagcgacatgggctggtataggcaagcccccggcaatgagtgtgagctggtgagcacaatcagcagcgacggctccacttactacgccgacagcgtcaagggaaggttcacaatcagccaagataacgccaagaacactgtgtatctgcagatgaactctctgaagccagaggacacagccgtgtactactgtgctgccgagcctaggggctactatagcaactacggcggaaggagggagtgcaattactggggccaaggcacacaagtgacagtttcttctgctagccaccatcaccatcaccac

SEQ ID NO: 361 - DNA, 774 bp, Artificial Sequence
  Description of Artificial Sequence: Synthetic polynucleotide
caggttcagctgctggaatctggcggaggattggttcagcctggcggctctctgagactgtcttgtgctgcctctggcgacatgatcatctccgaggacatgagctgggtccgacaggctcctggcaaaggactggaatgggtgtccacaatcgcctccgacgacggctctacctactacgccgattccgtgaagggcagattcaccatcagccgggacaactccaagaacaccctgtacctgcagatgaactccctgagagccgaggacaccgccgtgtactattgtgccggcttcgatgcccaggatgccgccattgaatattggggccagggcaccctggtcaccgtctcgagcggcggaggatcccaagtgcagctgcaagagagcggaggaggaagcgtgcaagccggaggctctctgaggctgagctgtgtggccagcggctacactttcagcagctactgcatgggctggttcagacaagcccccggcaaggaaagggaaggagtggccgctctgggcggaggaagcacatactacgctgacagcgtgaagggaaggttcacaatcagccaagataacgccaagaacacactgtatctgcagatgaactctctgaagccagaggacacagccatgtactactgtgccgctgcttgggtcgcttgtctggagttcggcggcagctggtacgatctggctaggtacaagcactggggccaaggcacacaagtgacagtttcttctgctagccaccatcaccatcaccac

SEQ ID NO: 362 - DNA, 744 bp, Artificial Sequence
  Description of Artificial Sequence: Synthetic polynucleotide
caggttcagctgcaagaatctggcggcggatctgttcaggctggcggatctctgagactgtcctgtgtcggctctggctacacctacgacacctccgacatgtcctggtacagacaggcccctggcaaagagagagagttcgtcagcgacatcgactccggcgattgggccgcttatgccgatgctgtgaagggcagattcaccatctctcgggacaacgccaagaaaaccgtgtacctgcagatgaactccctggaacctgaggacaccgccatgtactactgcaaggcctcctactggaagtggggcaagctgaacaacttctggggccctggcacacaagtgaccgtctcgagcggcggaggatcccaagtgcagctgcaagagagcggaggaggactggtccagcccggcggctctctgaggctgagctgcactgcttccggcttcagcttcagcagctaccctatgacatgggctaggcaagcccccggcaaaggactggaatgggtgagcactattgccagcgatggaggcagcacagcctacgctgccagcgtggagggaaggttcacaatctctagggacaatgccaagagcacactgtatctgcagctgaactctctgaagacagaggacactgccatgtactactgcactaagggctacggcgatggcacaccagctcccggccaaggcacacaagtgactgtttcttctgctagccaccatcaccatcaccac

SEQ ID NO: 363 - DNA, 753 bp, Artificial Sequence
  Description of Artificial Sequence: Synthetic polynucleotide
caggttcagctgcaagaatctggcggcggatctgttcaggctggcggatctctgagactgtcctgtgtcggctctggctacacctacgacacctccgacatgtcctggtacagacaggcccctggcaaagagagagagttcgtcagcgacatcgactccggcgattgggccgcttatgccgatgctgtgaagggcagattcaccatctctcgggacaacgccaagaaaaccgtgtacctgcagatgaactccctggaacctgaggacaccgccatgtactactgcaaggcctcctactggaagtggggcaagctgaacaacttctggggccctggcacacaagtgaccgtctcgagcggcggaggatcccaagtgcagctgcaagagagcggaggaggactggtgcagcccggcggctctctgaggctgagctgtgctgccagcggcttcactttcagcagcgctcacatgagctgggtgaggcaagcccccggcaaaggaagggagtggatcgcctccatctacagcggcggcggaacattctacgccgacagcgtgaagggaaggttcacaatctctagggacaacgccaagaacacactgtatctgcagctgaactctctgaaggccgaggacactgccatgtactactgcgccactaataggctgcactactacagcgacgatgattctctgaggggccaaggcacacaagtgacagtttcttctgctagccaccatcaccatcaccac

SEQ ID NO: 364 - DNA, 756 bp, Artificial Sequence
  Description of Artificial Sequence: Synthetic polynucleotide
caggttcagctgcaagaatctggcggcggatctgttcaggctggcggatctctgagactgtcctgtgtcggctctggctacacctacgacacctccgacatgtcctggtacagacaggcccctggcaaagagagagagttcgtcagcgacatcgactccggcgattgggccgcttatgccgatgctgtgaagggcagattcaccatctctcgggacaacgccaagaaaaccgtgtacctgcagatgaactccctggaacctgaggacaccgccatgtactactgcaaggcctcctactggaagtggggcaagctgaacaacttctggggccctggcacacaagtgaccgtctcgagcggcggaggatcccaagtgcagctgcaagagagcggaggaggaagcgtgcaagccggcggatctctgagactcagctgtactgcctccggcttcacattcgacgatagggagatgaactggtataggcaagcccccggcaatgagtgcgagctggtgagcacaatctccagcgatggcagcacttactacgccgatagcgtgaagggaaggttcactatctcccaagataacgccaagaacacagtctatctgcagatggactccgtcaagccagaggatactgccgtgtactactgcgccgccgacttcatgatcgccatccaagcccccggcgctggctgttggggacaaggcactcaagtgacagtttcttctgctagccaccatcaccatcaccac

SEQ ID NO: 365 - DNA, 750 bp, Artificial Sequence
  Description of Artificial Sequence: Synthetic polynucleotide
caggttcagctgcaagaatctggcggcggatctgttcaggctggcggatctctgagactgtcctgtgtcggctctggctacacctacgacacctccgacatgtcctggtacagacaggcccctggcaaagagagagagttcgtcagcgacatcgactccggcgattgggccgcttatgccgatgctgtgaagggcagattcaccatctctcgggacaacgccaagaaaaccgtgtacctgcagatgaactccctggaacctgaggacaccgccatgtactactgcaaggcctcctactggaagtggggcaagctgaacaacttctggggccctggcacacaagtgaccgtctcgagcggcggaggatcccaagtgcagctgcaagagagcggaggaggcagcgtgcaagccggaggctctctgagactgagctgtgtggccagcggctacacaagctgcatgggctggtttaggcaagcccccggcaaggagagagaggccgtggccacaatctacactaggggaaggagcatctactacgccgacagcgtgaaaggaaggttcacaatcagccaagataacgccaagaacactctgtatctgcagatgaacagcctcaagccagaggacatcgccatgtatagctgtgctgctggcggctatagctggagcgctggctgcgagttcaattactggggccaaggcacacaagtgactgtttcttctgctagccaccatcaccatcaccac

SEQ ID NO: 366 - DNA, 768 bp, Artificial Sequence
  Description of Artificial Sequence: Synthetic polynucleotide
caggttcagctgcaagaatctggcggcggatctgttcaggctggcggatctctgagactgtcctgtgtcggctctggctacacctacgacacctccgacatgtcctggtacagacaggcccctggcaaagagagagagttcgtcagcgacatcgactccggcgattgggccgcttatgccgatgctgtgaagggcagattcaccatctctcgggacaacgccaagaaaaccgtgtacctgcagatgaactccctggaacctgaggacaccgccatgtactactgcaaggcctcctactggaagtggggcaagctgaacaacttctggggccctggcacacaagtgaccgtctcgagcggcggaggatcccaagtgcagctgcaagagagcggaggcggaagcgtgcaagctggaggatctctgaggctgagctgcacagccagcggcttcactttcgatgacagcgacatgggctggtataggcaagcccccggcaatgagtgtgagctggtgagcacaatcagcagcgacggctccacttactacgccgacagcgtcaagggaaggttcacaatcagccaagataacgccaagaacactgtgtatctgcagatgaactctctgaagccagaggacacagccgtgtactactgtgctgccgagcctaggggctactatagcaactacggcggaaggagggagtgcaattactggggccaaggcacacaagtgacagtttcttctgctagccaccatcaccatcaccac

SEQ ID NO: 367 - DNA, 774 bp, Artificial Sequence
  Description of Artificial Sequence: Synthetic polynucleotide
caggttcagctgcaagaatctggcggcggatctgttcaggctggcggatctctgagactgtcctgtgtcggctctggctacacctacgacacctccgacatgtcctggtacagacaggcccctggcaaagagagagagttcgtcagcgacatcgactccggcgattgggccgcttatgccgatgctgtgaagggcagattcaccatctctcgggacaacgccaagaaaaccgtgtacctgcagatgaactccctggaacctgaggacaccgccatgtactactgcaaggcctcctactggaagtggggcaagctgaacaacttctggggccctggcacacaagtgaccgtctcgagcggcggaggatcccaagtgcagctgcaagagagcggaggaggaagcgtgcaagccggaggctctctgaggctgagctgtgtggccagcggctacactttcagcagctactgcatgggctggttcagacaagcccccggcaaggaaagggaaggagtggccgctctgggcggaggaagcacatactacgctgacagcgtgaagggaaggttcacaatcagccaagataacgccaagaacacactgtatctgcagatgaactctctgaagccagaggacacagccatgtactactgtgccgctgcttgggtcgcttgtctggagttcggcggcagctggtacgatctggctaggtacaagcactggggccaaggcacacaagtgacagtttcttctgctagccaccatcaccatcaccac

SEQ ID NO: 368 - DNA, 753 bp, Artificial Sequence
  Description of Artificial Sequence: Synthetic polynucleotide
caggttcagctgcaagagtctggcggaggattggttcagcctggcggatctctgaagctgtcttgtgccgcctccggcttccggttctctaactacggaatgtcctgggtccgacaggctcctggcgaaggacttgagtgggtgtcctacatcaacggcgacggcagcagaacccactacgccgattctgtgaagggcagattcaccatcagccgggacaacgccaagaacaccctgtacctgcagctcaactccctgaaaaccgaggacaccgccatgtactactgcgagaagggcctgtccagagatggctggtcactgtctgctgcttctagaggccagggcacccaagtgacagtctcgagcggcggaggatcccaagtgcagctgcaagagagcggaggaggactggtccagcccggcggctctctgaggctgagctgcactgcttccggcttcagcttcagcagctaccctatgacatgggctaggcaagcccccggcaaaggactggaatgggtgagcactattgccagcgatggaggcagcacagcctacgctgccagcgtggagggaaggttcacaatctctagggacaatgccaagagcacactgtatctgcagctgaactctctgaagacagaggacactgccatgtactactgcactaagggctacggcgatggcacaccagctcccggccaaggcacacaagtgactgtttcttctgctagccaccatcaccatcaccac

SEQ ID NO: 369 - DNA, 762 bp, Artificial Sequence
  Description of Artificial Sequence: Synthetic polynucleotide
caggttcagctgcaagagtctggcggaggattggttcagcctggcggatctctgaagctgtcttgtgccgcctccggcttccggttctctaactacggaatgtcctgggtccgacaggctcctggcgaaggacttgagtgggtgtcctacatcaacggcgacggcagcagaacccactacgccgattctgtgaagggcagattcaccatcagccgggacaacgccaagaacaccctgtacctgcagctcaactccctgaaaaccgaggacaccgccatgtactactgcgagaagggcctgtccagagatggctggtcactgtctgctgcttctagaggccagggcacccaagtgacagtctcgagcggcggaggatcccaagtgcagctgcaagagagcggaggaggactggtgcagcccggcggctctctgaggctgagctgtgctgccagcggcttcactttcagcagcgctcacatgagctgggtgaggcaagcccccggcaaaggaagggagtggatcgcctccatctacagcggcggcggaacattctacgccgacagcgtgaagggaaggttcacaatctctagggacaacgccaagaacacactgtatctgcagctgaactctctgaaggccgaggacactgccatgtactactgcgccactaataggctgcactactacagcgacgatgattctctgaggggccaaggcacacaagtgacagtttcttctgctagccaccatcaccatcaccac

SEQ ID NO: 370 - DNA, 765 bp, Artificial Sequence
  Description of Artificial Sequence: Synthetic polynucleotide
caggttcagctgcaagagtctggcggaggattggttcagcctggcggatctctgaagctgtcttgtgccgcctccggcttccggttctctaactacggaatgtcctgggtccgacaggctcctggcgaaggacttgagtgggtgtcctacatcaacggcgacggcagcagaacccactacgccgattctgtgaagggcagattcaccatcagccgggacaacgccaagaacaccctgtacctgcagctcaactccctgaaaaccgaggacaccgccatgtactactgcgagaagggcctgtccagagatggctggtcactgtctgctgcttctagaggccagggcacccaagtgacagtctcgagcggcggaggatcccaagtgcagctgcaagagagcggaggaggaagcgtgcaagccggcggatctctgagactcagctgtactgcctccggcttcacattcgacgatagggagatgaactggtataggcaagcccccggcaatgagtgcgagctggtgagcacaatctccagcgatggcagcacttactacgccgatagcgtgaagggaaggttcactatctcccaagataacgccaagaacacagtctatctgcagatggactccgtcaagccagaggatactgccgtgtactactgcgccgccgacttcatgatcgccatccaagcccccggcgctggctgttggggacaaggcactcaagtgacagtttcttctgctagccaccatcaccatcaccac

SEQ ID NO: 371 - DNA, 759 bp, Artificial Sequence
  Description of Artificial Sequence: Synthetic polynucleotide
caggttcagctgcaagagtctggcggaggattggttcagcctggcggatctctgaagctgtcttgtgccgcctccggcttccggttctctaactacggaatgtcctgggtccgacaggctcctggcgaaggacttgagtgggtgtcctacatcaacggcgacggcagcagaacccactacgccgattctgtgaagggcagattcaccatcagccgggacaacgccaagaacaccctgtacctgcagctcaactccctgaaaaccgaggacaccgccatgtactactgcgagaagggcctgtccagagatggctggtcactgtctgctgcttctagaggccagggcacccaagtgacagtctcgagcggcggaggatcccaagtgcagctgcaagagagcggaggaggcagcgtgcaagccggaggctctctgagactgagctgtgtggccagcggctacacaagctgcatgggctggtttaggcaagcccccggcaaggagagagaggccgtggccacaatctacactaggggaaggagcatctactacgccgacagcgtgaaaggaaggttcacaatcagccaagataacgccaagaacactctgtatctgcagatgaacagcctcaagccagaggacatcgccatgtatagctgtgctgctggcggctatagctggagcgctggctgcgagttcaattactggggccaaggcacacaagtgactgtttcttctgctagccaccatcaccatcaccac

SEQ ID NO: 372 - DNA, 777 bp, Artificial Sequence; identical to SEQ ID NO: 156
  Description of Artificial Sequence: Synthetic polynucleotide

SEQ ID NO: 373 - DNA, 783 bp, Artificial Sequence
  Description of Artificial Sequence: Synthetic polynucleotide
caggttcagctgcaagagtctggcggaggattggttcagcctggcggatctctgaagctgtcttgtgccgcctccggcttccggttctctaactacggaatgtcctgggtccgacaggctcctggcgaaggacttgagtgggtgtcctacatcaacggcgacggcagcagaacccactacgccgattctgtgaagggcagattcaccatcagccgggacaacgccaagaacaccctgtacctgcagctcaactccctgaaaaccgaggacaccgccatgtactactgcgagaagggcctgtccagagatggctggtcactgtctgctgcttctagaggccagggcacccaagtgacagtctcgagcggcggaggatcccaagtgcagctgcaagagagcggaggaggaagcgtgcaagccggaggctctctgaggctgagctgtgtggccagcggctacactttcagcagctactgcatgggctggttcagacaagcccccggcaaggaaagggaaggagtggccgctctgggcggaggaagcacatactacgctgacagcgtgaagggaaggttcacaatcagccaagataacgccaagaacacactgtatctgcagatgaactctctgaagccagaggacacagccatgtactactgtgccgctgcttgggtcgcttgtctggagttcggcggcagctggtacgatctggctaggtacaagcactggggccaaggcacacaagtgacagtttcttctgctagccaccatcaccatcaccac

SEQ ID NO: 374 - DNA, 762 bp, Artificial Sequence; identical to SEQ ID NO: 157
  Description of Artificial Sequence: Synthetic polynucleotide

SEQ ID NO: 375 - DNA, 771 bp, Artificial Sequence; identical to SEQ ID NO: 158
  Description of Artificial Sequence: Synthetic polynucleotide

SEQ ID NO: 376 - DNA, 774 bp, Artificial Sequence; identical to SEQ ID NO: 159
  Description of Artificial Sequence: Synthetic polynucleotide

SEQ ID NO: 377 - DNA, 768 bp, Artificial Sequence; identical to SEQ ID NO: 160
  Description of Artificial Sequence: Synthetic polynucleotide

SEQ ID NO: 378 - DNA, 786 bp, Artificial Sequence; identical to SEQ ID NO: 161
  Description of Artificial Sequence: Synthetic polynucleotide

SEQ ID NO: 379 - DNA, 792 bp, Artificial Sequence; identical to SEQ ID NO: 162
  Description of Artificial Sequence: Synthetic polynucleotide

SEQ ID NO: 380 - DNA, 735 bp, Artificial Sequence; identical to SEQ ID NO: 163
  Description of Artificial Sequence: Synthetic polynucleotide

SEQ ID NO: 381 - DNA, 744 bp, Artificial Sequence
  Description of Artificial Sequence: Synthetic polynucleotide
caggttcagctgcaagagtctggcggaggattggttcagcctggcggatctctgagactgtcctgtgtggcctctggcttcaccttctccaactactggatcttctgggtccgacaggccgctggcaaaggactggaatggctgtccacctctaacaccggcggagacaccactaagtacgccgactctgtgaagggcagattcaccatctccagagacagcgccaagaacaccgagtacctgcagatgaactccctgaagcctgaggacaccgccgtgtactactgcgagacaggcagatgcgctagatccggcggctatcagggcacccaagtgacagtctcgagcggcggaggatcccaagtgcagctgcaagagagcggaggaggactggtgcagcccggcggctctctgaggctgagctgtgctgccagcggcttcactttcagcagcgctcacatgagctgggtgaggcaagcccccggcaaaggaagggagtggatcgcctccatctacagcggcggcggaacattctacgccgacagcgtgaagggaaggttcacaatctctagggacaacgccaagaacacactgtatctgcagctgaactctctgaaggccgaggacactgccatgtactactgcgccactaataggctgcactactacagcgacgatgattctctgaggggccaaggcacacaagtgacagtttcttctgctagccaccatcaccatcaccac

SEQ ID NO: 382 - DNA, 747 bp, Artificial Sequence; identical to SEQ ID NO: 164
  Description of Artificial Sequence: Synthetic polynucleotide

SEQ ID NO: 383 - DNA, 741 bp, Artificial Sequence
  Description of Artificial Sequence: Synthetic polynucleotide
caggttcagctgcaagagtctggcggaggattggttcagcctggcggatctctgagactgtcctgtgtggcctctggcttcaccttctccaactactggatcttctgggtccgacaggccgctggcaaaggactggaatggctgtccacctctaacaccggcggagacaccactaagtacgccgactctgtgaagggcagattcaccatctccagagacagcgccaagaacaccgagtacctgcagatgaactccctgaagcctgaggacaccgccgtgtactactgcgagacaggcagatgcgctagatccggcggctatcagggcacccaagtgacagtctcgagcggcggaggatcccaagtgcagctgcaagagagcggaggaggcagcgtgcaagccggaggctctctgagactgagctgtgtggccagcggctacacaagctgcatgggctggtttaggcaagcccccggcaaggagagagaggccgtggccacaatctacactaggggaaggagcatctactacgccgacagcgtgaaaggaaggttcacaatcagccaagataacgccaagaacactctgtatctgcagatgaacagcctcaagccagaggacatcgccatgtatagctgtgctgctggcggctatagctggagcgctggctgcgagttcaattactggggccaaggcacacaagtgactgtttcttctgctagccaccatcaccatcaccac

SEQ ID NO: 384 - DNA, 759 bp, Artificial Sequence
  Description of Artificial Sequence: Synthetic polynucleotide
caggttcagctgcaagagtctggcggaggattggttcagcctggcggatctctgagactgtcctgtgtggcctctggcttcaccttctccaactactggatcttctgggtccgacaggccgctggcaaaggactggaatggctgtccacctctaacaccggcggagacaccactaagtacgccgactctgtgaagggcagattcaccatctccagagacagcgccaagaacaccgagtacctgcagatgaactccctgaagcctgaggacaccgccgtgtactactgcgagacaggcagatgcgctagatccggcggctatcagggcacccaagtgacagtctcgagcggcggaggatcccaagtgcagctgcaagagagcggaggcggaagcgtgcaagctggaggatctctgaggctgagctgcacagccagcggcttcactttcgatgacagcgacatgggctggtataggcaagcccccggcaatgagtgtgagctggtgagcacaatcagcagcgacggctccacttactacgccgacagcgtcaagggaaggttcacaatcagccaagataacgccaagaacactgtgtatctgcagatgaactctctgaagccagaggacacagccgtgtactactgtgctgccgagcctaggggctactatagcaactacggcggaaggagggagtgcaattactggggccaaggcacacaagtgacagtttcttctgctagccaccatcaccatcaccac

SEQ ID NO: 385 - DNA, 765 bp, Artificial Sequence
  Description of Artificial Sequence: Synthetic polynucleotide
caggttcagctgcaagagtctggcggaggattggttcagcctggcggatctctgagactgtcctgtgtggcctctggcttcaccttctccaactactggatcttctgggtccgacaggccgctggcaaaggactggaatggctgtccacctctaacaccggcggagacaccactaagtacgccgactctgtgaagggcagattcaccatctccagagacagcgccaagaacaccgagtacctgcagatgaactccctgaagcctgaggacaccgccgtgtactactgcgagacaggcagatgcgctagatccggcggctatcagggcacccaagtgacagtctcgagcggcggaggatcccaagtgcagctgcaagagagcggaggaggaagcgtgcaagccggaggctctctgaggctgagctgtgtggccagcggctacactttcagcagctactgcatgggctggttcagacaagcccccggcaaggaaagggaaggagtggccgctctgggcggaggaagcacatactacgctgacagcgtgaagggaaggttcacaatcagccaagataacgccaagaacacactgtatctgcagatgaactctctgaagccagaggacacagccatgtactactgtgccgctgcttgggtcgcttgtctggagttcggcggcagctggtacgatctggctaggtacaagcactggggccaaggcacacaagtgacagtttcttctgctagccaccatcaccatcaccac

SEQ ID NO: 386 - DNA, 759 bp, Artificial Sequence
  Description of Artificial Sequence: Synthetic polynucleotide
caggttcagctgcaagaatctggcggaggctctgtgcaagtcggcggatctctgagactgtcctgtgccacctctggcgacaccaagtctatcagatgcatgggctggttccggcagacccctggcaaagagagagagggaatcgccgccatcgacagagagggctttgccacctacgccgactccgtgtacgacagattcacaatcgcccaggacaacgcccagaacaccctgtacctggaaatgaacgccctgaagcctgaggacaccgccatgtactactgcgccgctcagaacatgtgcagagtcgtgcggggagctatgaccggcgttgactattggggcaagggcacccaagtgaccgtctcgagcggcggaggatcccaagtgcagctgcaagagagcggaggaggactggtccagcccggcggctctctgaggctgagctgcactgcttccggcttcagcttcagcagctaccctatgacatgggctaggcaagcccccggcaaaggactggaatgggtgagcactattgccagcgatggaggcagcacagcctacgctgccagcgtggagggaaggttcacaatctctagggacaatgccaagagcacactgtatctgcagctgaactctctgaagacagaggacactgccatgtactactgcactaagggctacggcgatggcacaccagctcccggccaaggcacacaagtgactgtttcttctgctagccaccatcaccatcaccac

SEQ ID NO: 387 - DNA, 768 bp, Artificial Sequence
  Description of Artificial Sequence: Synthetic polynucleotide
caggttcagctgcaagaatctggcggaggctctgtgcaagtcggcggatctctgagactgtcctgtgccacctctggcgacaccaagtctatcagatgcatgggctggttccggcagacccctggcaaagagagagagggaatcgccgccatcgacagagagggctttgccacctacgccgactccgtgtacgacagattcacaatcgcccaggacaacgcccagaacaccctgtacctggaaatgaacgccctgaagcctgaggacaccgccatgtactactgcgccgctcagaacatgtgcagagtcgtgcggggagctatgaccggcgttgactattggggcaagggcacccaagtgaccgtctcgagcggcggaggatcccaagtgcagctgcaagagagcggaggaggactggtgcagcccggcggctctctgaggctgagctgtgctgccagcggcttcactttcagcagcgctcacatgagctgggtgaggcaagcccccggcaaaggaagggagtggatcgcctccatctacagcggcggcggaacattctacgccgacagcgtgaagggaaggttcacaatctctagggacaacgccaagaacacactgtatctgcagctgaactctctgaaggccgaggacactgccatgtactactgcgccactaataggctgcactactacagcgacgatgattctctgaggggccaaggcacacaagtgacagtttcttctgctagccaccatcaccatcaccac

SEQ ID NO: 388 - DNA, 771 bp, Artificial Sequence
  Description of Artificial Sequence: Synthetic polynucleotide
caggttcagctgcaagaatctggcggaggctctgtgcaagtcggcggatctctgagactgtcctgtgccacctctggcgacaccaagtctatcagatgcatgggctggttccggcagacccctggcaaagagagagagggaatcgccgccatcgacagagagggctttgccacctacgccgactccgtgtacgacagattcacaatcgcccaggacaacgcccagaacaccctgtacctggaaatgaacgccctgaagcctgaggacaccgccatgtactactgcgccgctcagaacatgtgcagagtcgtgcggggagctatgaccggcgttgactattggggcaagggcacccaagtgaccgtctcgagcggcggaggatcccaagtgcagctgcaagagagcggaggaggaagcgtgcaagccggcggatctctgagactcagctgtactgcctccggcttcacattcgacgatagggagatgaactggtataggcaagcccccggcaatgagtgcgagctggtgagcacaatctccagcgatggcagcacttactacgccgatagcgtgaagggaaggttcactatctcccaagataacgccaagaacacagtctatctgcagatggactccgtcaagccagaggatactgccgtgtactactgcgccgccgacttcatgatcgccatccaagcccccggcgctggctgttggggacaaggcactcaagtgacagtttcttctgctagccaccatcaccatcaccac

SEQ ID NO: 389 - DNA, 765 bp, Artificial Sequence
  Description of Artificial Sequence: Synthetic polynucleotide
caggttcagctgcaagaatctggcggaggctctgtgcaagtcggcggatctctgagactgtcctgtgccacctctggcgacaccaagtctatcagatgcatgggctggttccggcagacccctggcaaagagagagagggaatcgccgccatcgacagagagggctttgccacctacgccgactccgtgtacgacagattcacaatcgcccaggacaacgcccagaacaccctgtacctggaaatgaacgccctgaagcctgaggacaccgccatgtactactgcgccgctcagaacatgtgcagagtcgtgcggggagctatgaccggcgttgactattggggcaagggcacccaagtgaccgtctcgagcggcggaggatcccaagtgcagctgcaagagagcggaggaggcagcgtgcaagccggaggctctctgagactgagctgtgtggccagcggctacacaagctgcatgggctggtttaggcaagcccccggcaaggagagagaggccgtggccacaatctacactaggggaaggagcatctactacgccgacagcgtgaaaggaaggttcacaatcagccaagataacgccaagaacactctgtatctgcagatgaacagcctcaagccagaggacatcgccatgtatagctgtgctgctggcggctatagctggagcgctggctgcgagttcaattactggggccaaggcacacaagtgactgtttcttctgctagccaccatcaccatcaccac

SEQ ID NO: 390 - DNA, 783 bp, Artificial Sequence
  Description of Artificial Sequence: Synthetic polynucleotide
caggttcagctgcaagaatctggcggaggctctgtgcaagtcggcggatctctgagactgtcctgtgccacctctggcgacaccaagtctatcagatgcatgggctggttccggcagacccctggcaaagagagagagggaatcgccgccatcgacagagagggctttgccacctacgccgactccgtgtacgacagattcacaatcgcccaggacaacgcccagaacaccctgtacctggaaatgaacgccctgaagcctgaggacaccgccatgtactactgcgccgctcagaacatgtgcagagtcgtgcggggagctatgaccggcgttgactattggggcaagggcacccaagtgaccgtctcgagcggcggaggatcccaagtgcagctgcaagagagcggaggcggaagcgtgcaagctggaggatctctgaggctgagctgcacagccagcggcttcactttcgatgacagcgacatgggctggtataggcaagcccccggcaatgagtgtgagctggtgagcacaatcagcagcgacggctccacttactacgccgacagcgtcaagggaaggttcacaatcagccaagataacgccaagaacactgtgtatctgcagatgaactctctgaagccagaggacacagccgtgtactactgtgctgccgagcctaggggctactatagcaactacggcggaaggagggagtgcaattactggggccaaggcacacaagtgacagtttcttctgctagccaccatcaccatcaccac

SEQ ID NO: 391 - DNA, 789 bp, Artificial Sequence
  Description of Artificial Sequence: Synthetic polynucleotide
caggttcagctgcaagaatctggcggaggctctgtgcaagtcggcggatctctgagactgtcctgtgccacctctggcgacaccaagtctatcagatgcatgggctggttccggcagacccctggcaaagagagagagggaatcgccgccatcgacagagagggctttgccacctacgccgactccgtgtacgacagattcacaatcgcccaggacaacgcccagaacaccctgtacctggaaatgaacgccctgaagcctgaggacaccgccatgtactactgcgccgctcagaacatgtgcagagtcgtgcggggagctatgaccggcgttgactattggggcaagggcacccaagtgaccgtctcgagcggcggaggatcccaagtgcagctgcaagagagcggaggaggaagcgtgcaagccggaggctctctgaggctgagctgtgtggccagcggctacactttcagcagctactgcatgggctggttcagacaagcccccggcaaggaaagggaaggagtggccgctctgggcggaggaagcacatactacgctgacagcgtgaagggaaggttcacaatcagccaagataacgccaagaacacactgtatctgcagatgaactctctgaagccagaggacacagccatgtactactgtgccgctgcttgggtcgcttgtctggagttcggcggcagctggtacgatctggctaggtacaagcactggggccaaggcacacaagtgacagtttcttctgctagccaccatcaccatcaccac

SEQ ID NO: 392 - DNA, 762 bp, Artificial Sequence
  Description of Artificial Sequence: Synthetic polynucleotide
caggttcagctgcaagaatctggcggaggctctgtgcaagtcggcggatctctgaagctgtcttgtgccgcctccggctacacctactccagctactactgcatgggctggttcagacaggcccctggcaaagagagagaaggcgtcgccgccatcgactctgatggctctacctcttacgccgactccgtgaagggcagattcaccatctctcaggacgacgccaagaacaccctgtacctgcagatgaactccctgaagcctgaggacaccgccatgtactactgcgccgcttcttacgaggtggtggactgctacccttctggctacggccaggattattggggcaagggcacccaagtgaccgtctcgagcggcggaggatcccaagtgcagctgcaagagagcggaggaggactggtccagcccggcggctctctgaggctgagctgcactgcttccggcttcagcttcagcagctaccctatgacatgggctaggcaagcccccggcaaaggactggaatgggtgagcactattgccagcgatggaggcagcacagcctacgctgccagcgtggagggaaggttcacaatctctagggacaatgccaagagcacactgtatctgcagctgaactctctgaagacagaggacactgccatgtactactgcactaagggctacggcgatggcacaccagctcccggccaaggcacacaagtgactgtttcttctgctagccaccatcaccatcaccac

SEQ ID NO: 393 - DNA, 771 bp, Artificial Sequence
  Description of Artificial Sequence: Synthetic polynucleotide
caggttcagctgcaagaatctggcggaggctctgtgcaagtcggcggatctctgaagctgtcttgtgccgcctccggctacacctactccagctactactgcatgggctggttcagacaggcccctggcaaagagagagaaggcgtcgccgccatcgactctgatggctctacctcttacgccgactccgtgaagggcagattcaccatctctcaggacgacgccaagaacaccctgtacctgcagatgaactccctgaagcctgaggacaccgccatgtactactgcgccgcttcttacgaggtggtggactgctacccttctggctacggccaggattattggggcaagggcacccaagtgaccgtctcgagcggcggaggatcccaagtgcagctgcaagagagcggaggaggactggtgcagcccggcggctctctgaggctgagctgtgctgccagcggcttcactttcagcagcgctcacatgagctgggtgaggcaagcccccggcaaaggaagggagtggatcgcctccatctacagcggcggcggaacattctacgccgacagcgtgaagggaaggttcacaatctctagggacaacgccaagaacacactgtatctgcagctgaactctctgaaggccgaggacactgccatgtactactgcgccactaataggctgcactactacagcgacgatgattctctgaggggccaaggcacacaagtgacagtttcttctgctagccaccatcaccatcaccac

SEQ ID NO: 394 - DNA, 774 bp, Artificial Sequence; identical to SEQ ID NO: 165
  Description of Artificial Sequence: Synthetic polynucleotide

SEQ ID NO: 395 - DNA, 768 bp, Artificial Sequence
  Description of Artificial Sequence: Synthetic polynucleotide
caggttcagctgcaagaatctggcggaggctctgtgcaagtcggcggatctctgaagctgtcttgtgccgcctccggctacacctactccagctactactgcatgggctggttcagacaggcccctggcaaagagagagaaggcgtcgccgccatcgactctgatggctctacctcttacgccgactccgtgaagggcagattcaccatctctcaggacgacgccaagaacaccctgtacctgcagatgaactccctgaagcctgaggacaccgccatgtactactgcgccgcttcttacgaggtggtggactgctacccttctggctacggccaggattattggggcaagggcacccaagtgaccgtctcgagcggcggaggatcccaagtgcagctgcaagagagcggaggaggcagcgtgcaagccggaggctctctgagactgagctgtgtggccagcggctacacaagctgcatgggctggtttaggcaagcccccggcaaggagagagaggccgtggccacaatctacactaggggaaggagcatctactacgccgacagcgtgaaaggaaggttcacaatcagccaagataacgccaagaacactctgtatctgcagatgaacagcctcaagccagaggacatcgccatgtatagctgtgctgctggcggctatagctggagcgctggctgcgagttcaattactggggccaaggcacacaagtgactgtttcttctgctagccaccatcaccatcaccac

SEQ ID NO: 396 - DNA, 786 bp, Artificial Sequence
  Description of Artificial Sequence: Synthetic polynucleotide
caggttcagctgcaagaatctggcggaggctctgtgcaagtcggcggatctctgaagctgtcttgtgccgcctccggctacacctactccagctactactgcatgggctggttcagacaggcccctggcaaagagagagaaggcgtcgccgccatcgactctgatggctctacctcttacgccgactccgtgaagggcagattcaccatctctcaggacgacgccaagaacaccctgtacctgcagatgaactccctgaagcctgaggacaccgccatgtactactgcgccgcttcttacgaggtggtggactgctacccttctggctacggccaggattattggggcaagggcacccaagtgaccgtctcgagcggcggaggatcccaagtgcagctgcaagagagcggaggcggaagcgtgcaagctggaggatctctgaggctgagctgcacagccagcggcttcactttcgatgacagcgacatgggctggtataggcaagcccccggcaatgagtgtgagctggtgagcacaatcagcagcgacggctccacttactacgccgacagcgtcaagggaaggttcacaatcagccaagataacgccaagaacactgtgtatctgcagatgaactctctgaagccagaggacacagccgtgtactactgtgctgccgagcctaggggctactatagcaactacggcggaaggagggagtgcaattactggggccaaggcacacaagtgacagtttcttctgctagccaccatcaccatcaccac

SEQ ID NO: 397 - DNA, 792 bp, Artificial Sequence
  Description of Artificial Sequence: Synthetic polynucleotide
caggttcagctgcaagaatctggcggaggctctgtgcaagtcggcggatctctgaagctgtcttgtgccgcctccggctacacctactccagctactactgcatgggctggttcagacaggcccctggcaaagagagagaaggcgtcgccgccatcgactctgatggctctacctcttacgccgactccgtgaagggcagattcaccatctctcaggacgacgccaagaacaccctgtacctgcagatgaactccctgaagcctgaggacaccgccatgtactactgcgccgcttcttacgaggtggtggactgctacccttctggctacggccaggattattggggcaagggcacccaagtgaccgtctcgagcggcggaggatcccaagtgcagctgcaagagagcggaggaggaagcgtgcaagccggaggctctctgaggctgagctgtgtggccagcggctacactttcagcagctactgcatgggctggttcagacaagcccccggcaaggaaagggaaggagtggccgctctgggcggaggaagcacatactacgctgacagcgtgaagggaaggttcacaatcagccaagataacgccaagaacacactgtatctgcagatgaactctctgaagccagaggacacagccatgtactactgtgccgctgcttgggtcgcttgtctggagttcggcggcagctggtacgatctggctaggtacaagcactggggccaaggcacacaagtgacagtttcttctgctagccaccatcaccatcaccac

SEQ ID NO: 398 - DNA, 759 bp, Artificial Sequence; identical to SEQ ID NO: 166
  Description of Artificial Sequence: Synthetic polynucleotide

SEQ ID NO: 399 - DNA, 768 bp, Artificial Sequence; identical to SEQ ID NO: 167
  Description of Artificial Sequence: Synthetic polynucleotide

SEQ ID NO: 400 - DNA, 771 bp, Artificial Sequence
  Description of Artificial Sequence: Synthetic polynucleotide
caggttcagctgcaagaatctggcggcggatctgttcaggctggcggatctctgagactgtcttgtgccgcctccgagtacaccgcctccagatactgtatggcctggttcagacaggcccctggcaaagagagagaaggcgtcgccgctattcatcctggcggaggcaccacctactacgccgattctgtgaagggcagattctccatcagccaggactccgccgacaacaccctgtacctgcagatgaactccctgaagcctgaggacaccgccatgtactactgtgccgctggatctctgtgggtgcccttcggcgatagatgtgccgctaattattggggccagggcacacaagtgaccgtctcgagcggcggaggatcccaagtgcagctgcaagagagcggaggaggaagcgtgcaagccggcggatctctgagactcagctgtactgcctccggcttcacattcgacgatagggagatgaactggtataggcaagcccccggcaatgagtgcgagctggtgagcacaatctccagcgatggcagcacttactacgccgatagcgtgaagggaaggttcactatctcccaagataacgccaagaacacagtctatctgcagatggactccgtcaagccagaggatactgccgtgtactactgcgccgccgacttcatgatcgccatccaagcccccggcgctggctgttggggacaaggcactcaagtgacagtttcttctgctagccaccatcaccatcaccac

SEQ ID NO: 401 - DNA, 765 bp, Artificial Sequence
  Description of Artificial Sequence: Synthetic polynucleotide
caggttcagctgcaagaatctggcggcggatctgttcaggctggcggatctctgagactgtcttgtgccgcctccgagtacaccgcctccagatactgtatggcctggttcagacaggcccctggcaaagagagagaaggcgtcgccgctattcatcctggcggaggcaccacctactacgccgattctgtgaagggcagattctccatcagccaggactccgccgacaacaccctgtacctgcagatgaactccctgaagcctgaggacaccgccatgtactactgtgccgctggatctctgtgggtgcccttcggcgatagatgtgccgctaattattggggccagggcacacaagtgaccgtctcgagcggcggaggatcccaagtgcagctgcaagagagcggaggaggcagcgtgcaagccggaggctctctgagactgagctgtgtggccagcggctacacaagctgcatgggctggtttaggcaagcccccggcaaggagagagaggccgtggccacaatctacactaggggaaggagcatctactacgccgacagcgtgaaaggaaggttcacaatcagccaagataacgccaagaacactctgtatctgcagatgaacagcctcaagccagaggacatcgccatgtatagctgtgctgctggcggctatagctggagcgctggctgcgagttcaattactggggccaaggcacacaagtgactgtttcttctgctagccaccatcaccatcaccac

SEQ ID NO: 402 - DNA, 783 bp, Artificial Sequence; identical to SEQ ID NO: 168
  Description of Artificial Sequence: Synthetic polynucleotide

SEQ ID NO: 403 - DNA, 789 bp, Artificial Sequence
  Description of Artificial Sequence: Synthetic polynucleotide
caggttcagctgcaagaatctggcggcggatctgttcaggctggcggatctctgagactgtcttgtgccgcctccgagtacaccgcctccagatactgtatggcctggttcagacaggcccctggcaaagagagagaaggcgtcgccgctattcatcctggcggaggcaccacctactacgccgattctgtgaagggcagattctccatcagccaggactccgccgacaacaccctgtacctgcagatgaactccctgaagcctgaggacaccgccatgtactactgtgccgctggatctctgtgggtgcccttcggcgatagatgtgccgctaattattggggccagggcacacaagtgaccgtctcgagcggcggaggatcccaagtgcagctgcaagagagcggaggaggaagcgtgcaagccggaggctctctgaggctgagctgtgtggccagcggctacactttcagcagctactgcatgggctggttcagacaagcccccggcaaggaaagggaaggagtggccgctctgggcggaggaagcacatactacgctgacagcgtgaagggaaggttcacaatcagccaagataacgccaagaacacactgtatctgcagatgaactctctgaagccagaggacacagccatgtactactgtgccgctgcttgggtcgcttgtctggagttcggcggcagctggtacgatctggctaggtacaagcactggggccaaggcacacaagtgacagtttcttctgctagccaccatcaccatcaccac

SEQ ID NO: 404 - DNA, 753 bp, Artificial Sequence
  Description of Artificial Sequence: Synthetic polynucleotide
caggttcagctgcaagaatctggcggcggatctgttcaggctggcggatctctgagactgtcttgtgccgcttccggctacgagtactgcagaatccacatgacctggtacagacaaggccctggcaaagagagagagttcgtcagctccatcggctccgacggcagaaagacctacgccaattctgtgaccggcagattcaccatcagccgggacaacgccaaccacaccgtgtacctgcagatgaactccctgtctcctgaggacaccgccatgtactactgcaagaccgagtacctgtacggcctgggctgtcctgatggctctgcttattggggccagggcacccaagtgaccgtctcgagcggcggaggatcccaagtgcagctgcaagagagcggaggaggactggtccagcccggcggctctctgaggctgagctgcactgcttccggcttcagcttcagcagctaccctatgacatgggctaggcaagcccccggcaaaggactggaatgggtgagcactattgccagcgatggaggcagcacagcctacgctgccagcgtggagggaaggttcacaatctctagggacaatgccaagagcacactgtatctgcagctgaactctctgaagacagaggacactgccatgtactactgcactaagggctacggcgatggcacaccagctcccggccaaggcacacaagtgactgtttcttctgctagccaccatcaccatcaccac

SEQ ID NO: 405 - DNA, 762 bp, Artificial Sequence; identical to SEQ ID NO: 169
  Description of Artificial Sequence: Synthetic polynucleotide

SEQ ID NO: 406 - DNA, 765 bp, Artificial Sequence
  Description of Artificial Sequence: Synthetic polynucleotide
caggttcagctgcaagaatctggcggcggatctgttcaggctggcggatctctgagactgtcttgtgccgcttccggctacgagtactgcagaatccacatgacctggtacagacaaggccctggcaaagagagagagttcgtcagctccatcggctccgacggcagaaagacctacgccaattctgtgaccggcagattcaccatcagccgggacaacgccaaccacaccgtgtacctgcagatgaactccctgtctcctgaggacaccgccatgtactactgcaagaccgagtacctgtacggcctgggctgtcctgatggctctgcttattggggccagggcacccaagtgaccgtctcgagcggcggaggatcccaagtgcagctgcaagagagcggaggaggaagcgtgcaagccggcggatctctgagactcagctgtactgcctccggcttcacattcgacgatagggagatgaactggtataggcaagcccccggcaatgagtgcgagctggtgagcacaatctccagcgatggcagcacttactacgccgatagcgtgaagggaaggttcactatctcccaagataacgccaagaacacagtctatctgcagatggactccgtcaagccagaggatactgccgtgtactactgcgccgccgacttcatgatcgccatccaagcccccggcgctggctgttggggacaaggcactcaagtgacagtttcttctgctagccaccatcaccatcaccac

SEQ ID NO: 407 - DNA, 759 bp, Artificial Sequence
  Description of Artificial Sequence: Synthetic polynucleotide
caggttcagctgcaagaatctggcggcggatctgttcaggctggcggatctctgagactgtcttgtgccgcttccggctacgagtactgcagaatccacatgacctggtacagacaaggccctggcaaagagagagagttcgtcagctccatcggctccgacggcagaaagacctacgccaattctgtgaccggcagattcaccatcagccgggacaacgccaaccacaccgtgtacctgcagatgaactccctgtctcctgaggacaccgccatgtactactgcaagaccgagtacctgtacggcctgggctgtcctgatggctctgcttattggggccagggcacccaagtgaccgtctcgagcggcggaggatcccaagtgcagctgcaagagagcggaggaggcagcgtgcaagccggaggctctctgagactgagctgtgtggccagcggctacacaagctgcatgggctggtttaggcaagcccccggcaaggagagagaggccgtggccacaatctacactaggggaaggagcatctactacgccgacagcgtgaaaggaaggttcacaatcagccaagataacgccaagaacactctgtatctgcagatgaacagcctcaagccagaggacatcgccatgtatagctgtgctgctggcggctatagctggagcgctggctgcgagttcaattactggggccaaggcacacaagtgactgtttcttctgctagccaccatcaccatcaccac

SEQ ID NO: 408 - DNA, 777 bp, Artificial Sequence
  Description of Artificial Sequence: Synthetic polynucleotide
caggttcagctgcaagaatctggcggcggatctgttcaggctggcggatctctgagactgtcttgtgccgcttccggctacgagtactgcagaatccacatgacctggtacagacaaggccctggcaaagagagagagttcgtcagctccatcggctccgacggcagaaagacctacgccaattctgtgaccggcagattcaccatcagccgggacaacgccaaccacaccgtgtacctgcagatgaactccctgtctcctgaggacaccgccatgtactactgcaagaccgagtacctgtacggcctgggctgtcctgatggctctgcttattggggccagggcacccaagtgaccgtctcgagcggcggaggatcccaagtgcagctgcaagagagcggaggcggaagcgtgcaagctggaggatctctgaggctgagctgcacagccagcggcttcactttcgatgacagcgacatgggctggtataggcaagcccccggcaatgagtgtgagctggtgagcacaatcagcagcgacggctccacttactacgccgacagcgtcaagggaaggttcacaatcagccaagataacgccaagaacactgtgtatctgcagatgaactctctgaagccagaggacacagccgtgtactactgtgctgccgagcctaggggctactatagcaactacggcggaaggagggagtgcaattactggggccaaggcacacaagtgacagtttcttctgctagccaccatcaccatcaccac

SEQ ID NO: 409 - DNA, 783 bp, Artificial Sequence
  Description of Artificial Sequence: Synthetic polynucleotide
caggttcagctgcaagaatctggcggcggatctgttcaggctggcggatctctgagactgtcttgtgccgcttccggctacgagtactgcagaatccacatgacctggtacagacaaggccctggcaaagagagagagttcgtcagctccatcggctccgacggcagaaagacctacgccaattctgtgaccggcagattcaccatcagccgggacaacgccaaccacaccgtgtacctgcagatgaactccctgtctcctgaggacaccgccatgtactactgcaagaccgagtacctgtacggcctgggctgtcctgatggctctgcttattggggccagggcacccaagtgaccgtctcgagcggcggaggatcccaagtgcagctgcaagagagcggaggaggaagcgtgcaagccggaggctctctgaggctgagctgtgtggccagcggctacactttcagcagctactgcatgggctggttcagacaagcccccggcaaggaaagggaaggagtggccgctctgggcggaggaagcacatactacgctgacagcgtgaagggaaggttcacaatcagccaagataacgccaagaacacactgtatctgcagatgaactctctgaagccagaggacacagccatgtactactgtgccgctgcttgggtcgcttgtctggagttcggcggcagctggtacgatctggctaggtacaagcactggggccaaggcacacaagtgacagtttcttctgctagccaccatcaccatcaccac

SEQ ID NO: 410 - protein, 5 aa, Artificial Sequence
  Description of Artificial Sequence: Synthetic peptide
TQDMS

SEQ ID NO: 411 - protein, 5 aa, Artificial Sequence
  Description of Artificial Sequence: Synthetic peptide
SEDMS

SEQ ID NO: 412 - protein, 9 aa, Artificial Sequence
  Description of Artificial Sequence: Synthetic peptide
YTYDTSDMS

SEQ ID NO: 413 - protein, 9 aa, Artificial Sequence
  Description of Artificial Sequence: Synthetic peptide
FRFSNYGMS

SEQ ID NO: 414 - protein, 10 aa, Artificial Sequence
  Description of Artificial Sequence: Synthetic peptide
YTTYSFNYMG

SEQ ID NO: 415 - protein, 9 aa, Artificial Sequence
  Description of Artificial Sequence: Synthetic peptide
FTFSNYWIF

SEQ ID NO: 416 - protein, 9 aa, Artificial Sequence
  Description of Artificial Sequence: Synthetic peptide
DTKSIRCMG

SEQ ID NO: 417 - protein, 10 aa, Artificial Sequence
  Description of Artificial Sequence: Synthetic peptide
YTYSSYYCMG

SEQ ID NO: 418 - protein, 9 aa, Artificial Sequence
  Description of Artificial Sequence: Synthetic peptide
YTASRYCMA

SEQ ID NO: 419 - protein, 9 aa, Artificial Sequence
  Description of Artificial Sequence: Synthetic peptide
YEYCRIHMT

SEQ ID NO: 420 - protein, 9 aa, Artificial Sequence
  Description of Artificial Sequence: Synthetic peptide
FSFSSYPMT

SEQ ID NO: 421 - protein, 9 aa, Artificial Sequence
  Description of Artificial Sequence: Synthetic peptide
FTFSSAHMS

SEQ ID NO: 422 - protein, 9 aa, Artificial Sequence
  Description of Artificial Sequence: Synthetic peptide
FTFDDREMN

SEQ ID NO: 423 - protein, 6 aa, Artificial Sequence
  Description of Artificial Sequence: Synthetic peptide
YTSCMG

SEQ ID NO: 424 - protein, 9 aa, Artificial Sequence
  Description of Artificial Sequence: Synthetic peptide
FTFDDSDMG

SEQ ID NO: 425 - protein, 9 aa, Artificial Sequence
  Description of Artificial Sequence: Synthetic peptide
YTFSSYCMG

SEQ ID NO: 426 - protein, 9 aa, Artificial Sequence
  Description of Artificial Sequence: Synthetic peptide
YTYDTSDMS

SEQ ID NO: 427 - protein, 16 aa, Artificial Sequence
  Description of Artificial Sequence: Synthetic peptide
DIDSGDWAAYADAVKG

SEQ ID NO: 428 - protein, 11 aa, Artificial Sequence
  Description of Artificial Sequence: Synthetic peptide
SYWKWGKLNNF

SEQ ID NO: 429 - protein, 9 aa, Artificial Sequence
  Description of Artificial Sequence: Synthetic peptide
FTFSNYWIF

SEQ ID NO: 430 - protein, 17 aa, Artificial Sequence
  Description of Artificial Sequence: Synthetic peptide
TSNTGGDTTKYADSVKG

SEQ ID NO: 431 - protein, 7 aa, Artificial Sequence
  Description of Artificial Sequence: Synthetic peptide
GRCARSG

SEQ ID NO: 432 - protein, 9 aa, Artificial Sequence
  Description of Artificial Sequence: Synthetic peptide
FRFSNYGMS

SEQ ID NO: 433 - protein, 17 aa, Artificial Sequence
  Description of Artificial Sequence: Synthetic peptide
YINGDGSRTHYADSVKG

SEQ ID NO: 434 - protein, 13 aa, Artificial Sequence
  Description of Artificial Sequence: Synthetic peptide
GLSRDGWSLSAAS

SEQ ID NO: 435 - protein, 10 aa, Artificial Sequence
  Description of Artificial Sequence: Synthetic peptide
YTTYSFNYMG

SEQ ID NO: 436 - protein, 17 aa, Artificial Sequence
  Description of Artificial Sequence: Synthetic peptide
VIYTGGGSTLYADSVKG

SEQ ID NO: 437 - protein, 15 aa, Artificial Sequence
  Description of Artificial Sequence: Synthetic peptide
DDQRFASPLYAYFGY

SEQ ID NO: 438 - protein, 9 aa, Artificial Sequence
  Description of Artificial Sequence: Synthetic peptide
DTKSIRCMG

SEQ ID NO: 439 - protein, 16 aa, Artificial Sequence
  Description of Artificial Sequence: Synthetic peptide
AIDREGFATYADSVYD

SEQ ID NO: 440 - protein, 16 aa, Artificial Sequence
  Description of Artificial Sequence: Synthetic peptide
QNMCRVVRGAMTGVDY

SEQ ID NO: 441 - protein, 9 aa, Artificial Sequence
  Description of Artificial Sequence: Synthetic peptide
YTASRYCMA

SEQ ID NO: 442 - protein, 17 aa, Artificial Sequence
  Description of Artificial Sequence: Synthetic peptide
AIHPGGGTTYYADSVKG

SEQ ID NO: 443 - protein, 15 aa, Artificial Sequence
  Description of Artificial Sequence: Synthetic peptide
GSLWVPFGDRCAANY

SEQ ID NO: 444 - protein, 9 aa, Artificial Sequence
  Description of Artificial Sequence: Synthetic peptide
YEYCRIHMT

SEQ ID NO: 445 - protein, 16 aa, Artificial Sequence
  Description of Artificial Sequence: Synthetic peptide
SIGSDGRKTYANSVTG

SEQ ID NO: 446 - protein, 14 aa, Artificial Sequence
  Description of Artificial Sequence: Synthetic peptide
EYLYGLGCPDGSAY

SEQ ID NO: 447 - protein, 10 aa, Artificial Sequence
  Description of Artificial Sequence: Synthetic peptide
YTYSSYYCMG

SEQ ID NO: 448 - protein, 16 aa, Artificial Sequence
  Description of Artificial Sequence: Synthetic peptide
AIDSDGSTSYADSVKG

SEQ ID NO: 449 - protein, 16 aa, Artificial Sequence
  Description of Artificial Sequence: Synthetic peptide
SYEVVDCYPSGYGQDY

SEQ ID NO: 450 - protein, 9 aa, Artificial Sequence
  Description of Artificial Sequence: Synthetic peptide
FTFSLYDMS

SEQ ID NO: 451 - protein, 17 aa, Artificial Sequence
  Description of Artificial Sequence: Synthetic peptide
GINSGGYSTYYAASAKG

SEQ ID NO: 452 - protein, 12 aa, Artificial Sequence
  Description of Artificial Sequence: Synthetic peptide
RGLTSPYVIPNI

SEQ ID NO: 453 - protein, 9 aa, Artificial Sequence
  Description of Artificial Sequence: Synthetic peptide
KSFSDYPLG

SEQ ID NO: 454 - protein, 17 aa, Artificial Sequence
  Description of Artificial Sequence: Synthetic peptide
HISWSGKLTYYRSTVKG

SEQ ID NO: 455 - protein, 21 aa, Artificial Sequence
  Description of Artificial Sequence: Synthetic peptide
MKLFNYGGRYCVLKPLTMYQQ

SEQ ID NO: 456 - protein, 9 aa, Artificial Sequence
  Description of Artificial Sequence: Synthetic peptide
RSFSGYAIG

SEQ ID NO: 457 - protein, 17 aa, Artificial Sequence
  Description of Artificial Sequence: Synthetic peptide
VVSWRGSSTYYADSVKG

SEQ ID NO: 458 - protein, 13 aa, Artificial Sequence
  Description of Artificial Sequence: Synthetic peptide
VPSGRSWYGRNRY

SEQ ID NO: 459 - protein, 9 aa, Artificial Sequence
  Description of Artificial Sequence: Synthetic peptide
RSINYYRMG

SEQ ID NO: 460 - protein, 16 aa, Artificial Sequence
  Description of Artificial Sequence: Synthetic peptide
AIKWGGDGVYADSVKG

SEQ ID NO: 461 - protein, 14 aa, Artificial Sequence
  Description of Artificial Sequence: Synthetic peptide
MPLSSWSRGGYLEV

SEQ ID NO: 462 - protein, 10 aa, Artificial Sequence
  Description of Artificial Sequence: Synthetic peptide
RFSWGNYAMY

SEQ ID NO: 463 - protein, 17 aa, Artificial Sequence
  Description of Artificial Sequence: Synthetic peptide
AIGRNSMATYYRDSAKG

SEQ ID NO: 464 - protein, 14 aa, Artificial Sequence
  Description of Artificial Sequence: Synthetic peptide
KFMVADGWSRQYDY

SEQ ID NO: 465 - protein, 8 aa, Artificial Sequence
  Description of Artificial Sequence: Synthetic peptide
RTFRRFMG

SEQ ID NO: 466 - protein, 17 aa, Artificial Sequence
  Description of Artificial Sequence: Synthetic peptide
AINWPGGGTYYGDSVKG

SEQ ID NO: 467 - protein, 11 aa, Artificial Sequence
  Description of Artificial Sequence: Synthetic peptide
TRKYNLYKFAD

SEQ ID NO: 468 - protein, 9 aa, Artificial Sequence
  Description of Artificial Sequence: Synthetic peptide
RIFNTYSMG

SEQ ID NO: 469 - protein, 17 aa, Artificial Sequence
  Description of Artificial Sequence: Synthetic peptide
AIRWSGGTTYYTDSVKG

SEQ ID NO: 470 - protein, 13 aa, Artificial Sequence
  Description of Artificial Sequence: Synthetic peptide
RVRLSNTALLQRY

SEQ ID NO: 471 - protein, 9 aa, Artificial Sequence
  Description of Artificial Sequence: Synthetic peptide
RTFGDYPIG

SEQ ID NO: 472 - protein, 17 aa, Artificial Sequence
  Description of Artificial Sequence: Synthetic peptide
SISWGGSRQYYTDSVKG

SEQ ID NO: 473 - protein, 13 aa, Artificial Sequence
  Description of Artificial Sequence: Synthetic peptide
RVRLSNTALLQRY

SEQ ID NO: 474 - protein, 9 aa, Artificial Sequence
  Description of Artificial Sequence: Synthetic peptide
RTFNSYAMG

SEQ ID NO: 475 - protein, 17 aa, Artificial Sequence
  Description of Artificial Sequence: Synthetic peptide
VITWNSGRTYYADSVKG

SEQ ID NO: 476 - protein, 8 aa, Artificial Sequence
  Description of Artificial Sequence: Synthetic peptide
APWAHNRE

SEQ ID NO: 477 - protein, 9 aa, Artificial Sequence
  Description of Artificial Sequence: Synthetic peptide
LTFRTYYMS

SEQ ID NO: 478 - protein, 17 aa, Artificial Sequence
  Description of Artificial Sequence: Synthetic peptide
VISWIGSTTLYADSVKG

SEQ ID NO: 479 - protein, 12 aa, Artificial Sequence
  Description of Artificial Sequence: Synthetic peptide
NFLREGKREPRY

SEQ ID NO: 480 - protein, 9 aa, Artificial Sequence
  Description of Artificial Sequence: Synthetic peptide
RIFNTYSMG

SEQ ID NO: 481 - protein, 17 aa, Artificial Sequence
  Description of Artificial Sequence: Synthetic peptide
AIRWSGGTTYYTDSVKG

SEQ ID NO: 482 - protein, 7 aa, Artificial Sequence
  Description of Artificial Sequence: Synthetic peptide
RVFARRY

SEQ ID NO: 483 - protein, 9 aa, Artificial Sequence
  Description of Artificial Sequence: Synthetic peptide
RTLSTYAMG

SEQ ID NO: 484 - protein, 17 aa, Artificial Sequence
  Description of Artificial Sequence: Synthetic peptide
AIRWASGRTYYGDSVKG

SEQ ID NO: 485 - protein, 13 aa, Artificial Sequence
  Description of Artificial Sequence: Synthetic peptide
RSRPYLNYGDFGY

SEQ ID NO: 486 - protein, 9 aa, Artificial Sequence
  Description of Artificial Sequence: Synthetic peptide
RTISTYAMV

SEQ ID NO: 487 - protein, 17 aa, Artificial Sequence
  Description of Artificial Sequence: Synthetic peptide
VISRSGDRTYYADSVKG

SEQ ID NO: 488 - protein, 11 aa, Artificial Sequence
  Description of Artificial Sequence: Synthetic peptide
GGYTGIETITA

SEQ ID NO: 489 - protein, 9 aa, Artificial Sequence
  Description of Artificial Sequence: Synthetic peptide
SIFNNNAVY

SEQ ID NO: 490 - protein, 16 aa, Artificial Sequence
  Description of Artificial Sequence: Synthetic peptide
LITIGGRTGYADSVKG

SEQ ID NO: 491 - protein, 16 aa, Artificial Sequence
  Description of Artificial Sequence: Synthetic peptide
GLKFGFNFYSKTAYDY

SEQ ID NO: 492 - protein, 9 aa, Artificial Sequence
  Description of Artificial Sequence: Synthetic peptide
RIFNTYSMG

SEQ ID NO: 493 - protein, 17 aa, Artificial Sequence
  Description of Artificial Sequence: Synthetic peptide
AIRWSGGTTYYTDSVKG

SEQ ID NO: 494 - protein, 13 aa, Artificial Sequence
  Description of Artificial Sequence: Synthetic peptide
VPSGRSWYGRNRY

SEQ ID NO: 495 - protein, 9 aa, Artificial Sequence
  Description of Artificial Sequence: Synthetic peptide
RTFGYVAMG

SEQ ID NO: 496 - protein, 17 aa, Artificial Sequence
  Description of Artificial Sequence: Synthetic peptide
SINWSGGSTAYADSVKG

SEQ ID NO: 497 - protein, 16 aa, Artificial Sequence
  Description of Artificial Sequence: Synthetic peptide
STRFYIATMEQGSYDY

SEQ ID NO: 498 - protein, 9 aa, Artificial Sequence
  Description of Artificial Sequence: Synthetic peptide
RSFRSYAIG

SEQ ID NO: 499 - protein, 17 aa, Artificial Sequence
  Description of Artificial Sequence: Synthetic peptide
AISYDGRRTYYGRSLKD

SEQ ID NO: 500 - protein, 14 aa, Artificial Sequence
  Description of Artificial Sequence: Synthetic peptide
HRSGTMFARYGMDY

SEQ ID NO: 501 - protein, 9 aa, Artificial Sequence
  Description of Artificial Sequence: Synthetic peptide
RTFSSYAMG

SEQ ID NO: 502 - protein, 17 aa, Artificial Sequence
  Description of Artificial Sequence: Synthetic peptide
AISRSGGYTSYADSVKG

SEQ ID NO: 503 - protein, 11 aa, Artificial Sequence
  Description of Artificial Sequence: Synthetic peptide
LIAPFYYGMDY

SEQ ID NO: 504 - protein, 9 aa, Artificial Sequence
  Description of Artificial Sequence: Synthetic peptide
PTFTSYTMG

SEQ ID NO: 505 - protein, 16 aa, Artificial Sequence
  Description of Artificial Sequence: Synthetic peptide
VISKGGRTYYADSVKG

SEQ ID NO: 506 - protein, 13 aa, Artificial Sequence
  Description of Artificial Sequence: Synthetic peptide
QRVGATSKYEYDY

SEQ ID NO: 507 - protein, 9 aa, Artificial Sequence
  Description of Artificial Sequence: Synthetic peptide
FTFSTDWMY

SEQ ID NO: 508 - protein, 17 aa, Artificial Sequence
  Description of Artificial Sequence: Synthetic peptide
LINTDGTSTSYTKSVKG

SEQ ID NO: 509 - protein, 11 aa, Artificial Sequence
  Description of Artificial Sequence: Synthetic peptide
GRTYWFYAMDY

SEQ ID NO: 510 - protein, 8 aa, Artificial Sequence
  Description of Artificial Sequence: Synthetic peptide
RISNYAMG

SEQ ID NO: 511 - protein, 17 aa, Artificial Sequence
  Description of Artificial Sequence: Synthetic peptide
VITRSGGSTYYADSVKG

SEQ ID NO: 512 - protein, 15 aa, Artificial Sequence
  Description of Artificial Sequence: Synthetic peptide
RRSQKLVTFGAEYPW

SEQ ID NO: 513 - protein, 9 aa, Artificial Sequence
  Description of Artificial Sequence: Synthetic peptide
RTGTHYAMG

SEQ ID NO: 514 - protein, 17 aa, Artificial Sequence
  Description of Artificial Sequence: Synthetic peptide
LILWNGEFTTYKDSVKG

SEQ ID NO: 515 - protein, 7 aa, Artificial Sequence
  Description of Artificial Sequence: Synthetic peptide
RVFARRY

SEQ ID NO: 516 - protein, 9 aa, Artificial Sequence
  Description of Artificial Sequence: Synthetic peptide
FTFSNYWMY

SEQ ID NO: 517 - protein, 17 aa, Artificial Sequence
  Description of Artificial Sequence: Synthetic peptide
HINTNGGNTYYRHSVKG

SEQ ID NO: 518 - protein, 14 aa, Artificial Sequence
  Description of Artificial Sequence: Synthetic peptide
ANSDVGLGYYGMDY

SEQ ID NO: 519 - protein, 9 aa, Artificial Sequence
  Description of Artificial Sequence: Synthetic peptide
SIFNNNAVY

SEQ ID NO: 520 - protein, 16 aa, Artificial Sequence
  Description of Artificial Sequence: Synthetic peptide
LITIGGRTGYADSVKG

SEQ ID NO: 521 - protein, 11 aa, Artificial Sequence
  Description of Artificial Sequence: Synthetic peptide
RPGYWSSSYDY

SEQ ID NO: 522 - protein, 9 aa, Artificial Sequence
  Description of Artificial Sequence: Synthetic peptide
RAPASYAMA

SEQ ID NO: 523 - protein, 17 aa, Artificial Sequence
  Description of Artificial Sequence: Synthetic peptide
AINWSGRRTYYADSVKG

SEQ ID NO: 524 - protein, 7 aa, Artificial Sequence
  Description of Artificial Sequence: Synthetic peptide
YLSGTYY

SEQ ID NO: 525 - protein, 9 aa, Artificial Sequence
  Description of Artificial Sequence: Synthetic peptide
LASSSFFMT

SEQ ID NO: 526 - protein, 17 aa, Artificial Sequence
  Description of Artificial Sequence: Synthetic peptide
TISWTGRTSYYAASVKG

SEQ ID NO: 527 - protein, 13 aa, Artificial Sequence
  Description of Artificial Sequence: Synthetic peptide
YPRTLVRNREPIH

SEQ ID NO: 528 - protein, 9 aa, Artificial Sequence
  Description of Artificial Sequence: Synthetic peptide
FTFDDSDMG

SEQ ID NO: 529 - protein, 16 aa, Artificial Sequence
  Description of Artificial Sequence: Synthetic peptide
TISSDGSTYYADSVKG

SEQ ID NO: 530 - protein, 13 aa, Artificial Sequence
  Description of Artificial Sequence: Synthetic peptide
DFMIAIQAPGAGC

SEQ ID NO: 531 - protein, 9 aa, Artificial Sequence
  Description of Artificial Sequence: Synthetic peptide
FSFSSYPMT

SEQ ID NO: 532 - protein, 17 aa, Artificial Sequence
  Description of Artificial Sequence: Synthetic peptide
TIASDGGSTAYAASVEG

SEQ ID NO: 533 - protein, 8 aa, Artificial Sequence
  Description of Artificial Sequence: Synthetic peptide
GYGDGTPA

SEQ ID NO: 534 - protein, 9 aa, Artificial Sequence
  Description of Artificial Sequence: Synthetic peptide
FTFDDREMN

SEQ ID NO: 535 - protein, 16 aa, Artificial Sequence
  Description of Artificial Sequence: Synthetic peptide
TISSDGSTYYADSVKG

SEQ ID NO: 536 - protein, 13 aa, Artificial Sequence
  Description of Artificial Sequence: Synthetic peptide
DFMIAIQAPGAGC

SEQ ID NO: 537 - protein, 9 aa, Artificial Sequence
  Description of Artificial Sequence: Synthetic peptide
FTFDDSDMG

SEQ ID NO: 538 - protein, 16 aa, Artificial Sequence
  Description of Artificial Sequence: Synthetic peptide
TISSDGNTYYTDSVKG

SEQ ID NO: 539 - protein, 17 aa, Artificial Sequence
  Description of Artificial Sequence: Synthetic peptide
EPRGYYSNYGGRRECNY

SEQ ID NO: 540 - protein, 9 aa, Artificial Sequence
  Description of Artificial Sequence: Synthetic peptide
FSFSSYPMT

SEQ ID NO: 541 - protein, 17 aa, Artificial Sequence
  Description of Artificial Sequence: Synthetic peptide
TIASDGGSTAYAASVEG

SEQ ID NO: 542 - protein, 8 aa, Artificial Sequence
  Description of Artificial Sequence: Synthetic peptide
GYGDGTPA

SEQ ID NO: 543 - protein, 9 aa, Artificial Sequence
  Description of Artificial Sequence: Synthetic peptide
FTFSNAHMS

SEQ ID NO: 544 - protein, 16 aa, Artificial Sequence
  Description of Artificial Sequence: Synthetic peptide
SIYSGGSTWYADSVKG

SEQ ID NO: 545 - protein, 12 aa, Artificial Sequence
  Description of Artificial Sequence: Synthetic peptide
NRLHYYSDDDSL

SEQ ID NO: 546 - protein, 9 aa, Artificial Sequence
  Description of Artificial Sequence: Synthetic peptide
FTFDDREMN

SEQ ID NO: 547 - protein, 16 aa, Artificial Sequence
  Description of Artificial Sequence: Synthetic peptide
TISSDGSTYYADSVKG

SEQ ID NO: 548 - protein, 13 aa, Artificial Sequence
  Description of Artificial Sequence: Synthetic peptide
DFMIAIQAPGAGC

SEQ ID NO: 549 - protein, 9 aa, Artificial Sequence
  Description of Artificial Sequence: Synthetic peptide
YTFSSYCMG

SEQ ID NO: 550 - protein, 15 aa, Artificial Sequence
  Description of Artificial Sequence: Synthetic peptide
ALGGGSTYYADSVKG

SEQ ID NO: 551 - protein, 20 aa, Artificial Sequence
  Description of Artificial Sequence: Synthetic peptide
AWVACLEFGGSWYDLARYKH

SEQ ID NO: 552 - protein, 9 aa, Artificial Sequence
  Description of Artificial Sequence: Synthetic peptide
FTFDDSDMG

SEQ ID NO: 553 - protein, 16 aa, Artificial Sequence
  Description of Artificial Sequence: Synthetic peptide
TISSDGSTYYADSVKG

SEQ ID NO: 554 - protein, 17 aa, Artificial Sequence
  Description of Artificial Sequence: Synthetic peptide
EPRGYYSNYGGRRECNY

SEQ ID NO: 555 - protein, 9 aa, Artificial Sequence
  Description of Artificial Sequence: Synthetic peptide
SIYSSAYIG

SEQ ID NO: 556 - protein, 17 aa, Artificial Sequence
  Description of Artificial Sequence: Synthetic peptide
GIYTRDGSTAYADSVKG

SEQ ID NO: 557 - protein, 18 aa, Artificial Sequence
  Description of Artificial Sequence: Synthetic peptide
GRRTKSYVYIFRPEEYNY

SEQ ID NO: 558 - protein, 9 aa, Artificial Sequence
  Description of Artificial Sequence: Synthetic peptide
FTFSSAHMS

SEQ ID NO: 559 - protein, 16 aa, Artificial Sequence
  Description of Artificial Sequence: Synthetic peptide
SIYSGGGTFYADSVKG

SEQ ID NO: 560 - protein, 12 aa, Artificial Sequence
  Description of Artificial Sequence: Synthetic peptide
NRLHYYSDDDSL

SEQ ID NO: 561 - protein, 9 aa, Artificial Sequence
  Description of Artificial Sequence: Synthetic peptide
FTFSNAHMS

SEQ ID NO: 562 - protein, 16 aa, Artificial Sequence
  Description of Artificial Sequence: Synthetic peptide
SIYSGGSTWYADSVKG

SEQ ID NO: 563 - protein, 12 aa, Artificial Sequence
  Description of Artificial Sequence: Synthetic peptide
NRLHYYSDDDSL

SEQ ID NO: 564 - protein, 9 aa, Artificial Sequence
  Description of Artificial Sequence: Synthetic peptide
FIFDDSDMG

SEQ ID NO: 565 - protein, 16 aa, Artificial Sequence
  Description of Artificial Sequence: Synthetic peptide
TISSDGSTYYADSVKG

SEQ ID NO: 566 - protein, 17 aa, Artificial Sequence
  Description of Artificial Sequence: Synthetic peptide
EPRGYYSNYGGRRECNY

SEQ ID NO: 567 - protein, 9 aa, Artificial Sequence
  Description of Artificial Sequence: Synthetic peptide
FTADDSDMG

SEQ ID NO: 568 - protein, 16 aa, Artificial Sequence
  Description of Artificial Sequence: Synthetic peptide
TISSDGSTYYADSVKG

SEQ ID NO: 569 - protein, 17 aa, Artificial Sequence
  Description of Artificial Sequence: Synthetic peptide
EPRGYYSNYGGRRECNY

SEQ ID NO: 570 - protein, 9 aa, Artificial Sequence
  Description of Artificial Sequence: Synthetic peptide
FTFSSAHMS

SEQ ID NO: 571 - protein, 16 aa, Artificial Sequence
  Description of Artificial Sequence: Synthetic peptide
SIYSGGGTFYADSVKG

SEQ ID NO: 572 - protein, 12 aa, Artificial Sequence
  Description of Artificial Sequence: Synthetic peptide
NRLHYYSDDDSL

SEQ ID NO: 573 - protein, 9 aa, Artificial Sequence
  Description of Artificial Sequence: Synthetic peptide
FTFSNAHMS

SEQ ID NO: 574 - protein, 16 aa, Artificial Sequence
  Description of Artificial Sequence: Synthetic peptide
SIYSGGSTWYADSVKG

SEQ ID NO: 575 - protein, 12 aa, Artificial Sequence
  Description of Artificial Sequence: Synthetic peptide
NRLHYYSDDDSL

SEQ ID NO: 576 - protein, 9 aa, Artificial Sequence
  Description of Artificial Sequence: Synthetic peptide
FTFSNAHMS

SEQ ID NO: 577 - protein, 16 aa, Artificial Sequence
  Description of Artificial Sequence: Synthetic peptide
SIYSGGSTWYADSVKG

SEQ ID NO: 578 - protein, 12 aa, Artificial Sequence
  Description of Artificial Sequence: Synthetic peptide
NRLHYYSDDDSL

SEQ ID NO: 579 - protein, 9 aa, Artificial Sequence
  Description of Artificial Sequence: Synthetic peptide
FTFSSYPMT

SEQ ID NO: 580 - protein, 17 aa, Artificial Sequence
  Description of Artificial Sequence: Synthetic peptide
TIASDGGSTAYAASVEG

SEQ ID NO: 581 - protein, 8 aa, Artificial Sequence
  Description of Artificial Sequence: Synthetic peptide
GYGDGTPA

SEQ ID NO: 582 - protein, 9 aa, Artificial Sequence
  Description of Artificial Sequence: Synthetic peptide
FTFDDREMN

SEQ ID NO: 583 - protein, 16 aa, Artificial Sequence
  Description of Artificial Sequence: Synthetic peptide
TISSDGSTYYADSVKG

SEQ ID NO: 584 - protein, 13 aa, Artificial Sequence
  Description of Artificial Sequence: Synthetic peptide
DFMIAIQAPGAGC

SEQ ID NO: 585 - protein, 9 aa, Artificial Sequence
  Description of Artificial Sequence: Synthetic peptide
FTFDDSDMG

SEQ ID NO: 586 - protein, 16 aa, Artificial Sequence
  Description of Artificial Sequence: Synthetic peptide
TISSDGSTYYADSVKG

SEQ ID NO: 587 - protein, 17 aa, Artificial Sequence
  Description of Artificial Sequence: Synthetic peptide
EPRGYYSNYGGRRECNY

SEQ ID NO: 588 - protein, 6 aa, Artificial Sequence
  Description of Artificial Sequence: Synthetic peptide
YTSCMG

SEQ ID NO: 589 - protein, 17 aa, Artificial Sequence
  Description of Artificial Sequence: Synthetic peptide
TIYTRGRSIYYADSVKG

SEQ ID NO: 590 - protein, 13 aa, Artificial Sequence
  Description of Artificial Sequence: Synthetic peptide
GGYSWSAGCEFNY

SEQ ID NO: 591 - protein, 9 aa, Artificial Sequence
  Description of Artificial Sequence: Synthetic peptide
FSFSSYPMT

SEQ ID NO: 592 - protein, 17 aa, Artificial Sequence
  Description of Artificial Sequence: Synthetic peptide
TIASDGGSTAYAASVEG

SEQ ID NO: 593 - protein, 8 aa, Artificial Sequence
  Description of Artificial Sequence: Synthetic peptide
GYGDGTPA

SEQ ID NO: 594 - protein, 9 aa, Artificial Sequence
  Description of Artificial Sequence: Synthetic peptide
FSFSSYPMT

SEQ ID NO: 595 - protein, 17 aa, Artificial Sequence
  Description of Artificial Sequence: Synthetic peptide
TIASDGGSTAYAASVEG

SEQ ID NO: 596 - protein, 8 aa, Artificial Sequence
  Description of Artificial Sequence: Synthetic peptide
GYGDGTPA

SEQ ID NO: 597 - protein, 7 aa, Artificial Sequence
  Description of Artificial Sequence: Synthetic peptide
YGYNYIG

SEQ ID NO: 598 - protein, 17 aa, Artificial Sequence
  Description of Artificial Sequence: Synthetic peptide
VIYTGGGDTYYADSVKG

SEQ ID NO: 599 - protein, 15 aa, Artificial Sequence
  Description of Artificial Sequence: Synthetic peptide
SVYACLRGGHDEYAH

SEQ ID NO: 600 - protein, 9 aa, Artificial Sequence
  Description of Artificial Sequence: Synthetic peptide
STYANYLMG

SEQ ID NO: 601 - protein, 17 aa, Artificial Sequence
  Description of Artificial Sequence: Synthetic peptide
AIYSGGGSTYYADSVKG

SEQ ID NO: 602 - protein, 25 aa, Artificial Sequence
  Description of Artificial Sequence: Synthetic peptide
ASAVKGDKGDIVVVVTGTQRMEYDY

SEQ ID NO: 603 - protein, 9 aa, Artificial Sequence
  Description of Artificial Sequence: Synthetic peptide
FTFDESVMS

SEQ ID NO: 604 - protein, 16 aa, Artificial Sequence
  Description of Artificial Sequence: Synthetic peptide
IISSDDNTYYDDSVKG

SEQ ID NO: 605 - protein, 24 aa, Artificial Sequence
  Description of Artificial Sequence: Synthetic peptide
RRRRPVYDSDYELRPRPLCGDFGV

SEQ ID NO: 606 - protein, 9 aa, Artificial Sequence
  Description of Artificial Sequence: Synthetic peptide
LPFDEDDMG

SEQ ID NO: 607 - protein, 16 aa, Artificial Sequence
  Description of Artificial Sequence: Synthetic peptide
SISSDGTAYYADSVKG

SEQ ID NO: 608 - protein, 21 aa, Artificial Sequence
  Description of Artificial Sequence: Synthetic peptide
GVHRQFGGSSSCGDAFYGMDY

SEQ ID NO: 609 - protein, 9 aa, Artificial Sequence
  Description of Artificial Sequence: Synthetic peptide
DVYGRNSMA

SEQ ID NO: 610 - protein, 17 aa, Artificial Sequence
  Description of Artificial Sequence: Synthetic peptide
VGYSVVTTTYYADSVKG

SEQ ID NO: 611 - protein, 15 aa, Artificial Sequence
  Description of Artificial Sequence: Synthetic peptide
DGNLWRGLRPSEYTY

SEQ ID NO: 612 - protein, 9 aa, Artificial Sequence
  Description of Artificial Sequence: Synthetic peptide
FPYSRYCMG

SEQ ID NO: 613 - protein, 16 aa, Artificial Sequence
  Description of Artificial Sequence: Synthetic peptide
AIEPDGSTSYADSVKG

SEQ ID NO: 614 - protein, 20 aa, Artificial Sequence
  Description of Artificial Sequence: Synthetic peptide
DERCFYLKDYDLRRPAQYRY

SEQ ID NO: 615 - protein, 9 aa, Artificial Sequence
  Description of Artificial Sequence: Synthetic peptide
FTFDESDMG

SEQ ID NO: 616 - protein, 16 aa, Artificial Sequence
  Description of Artificial Sequence: Synthetic peptide
VITSDDNPYYDDSVKG

SEQ ID NO: 617 - protein, 24 aa, Artificial Sequence
  Description of Artificial Sequence: Synthetic peptide
RSRQPVYSRDYELRPRPLCGDFGV

SEQ ID NO: 618 - protein, 9 aa, Artificial Sequence
  Description of Artificial Sequence: Synthetic peptide
FTFDDFDMG

SEQ ID NO: 619 - protein, 16 aa, Artificial Sequence
  Description of Artificial Sequence: Synthetic peptide
TISDDGSTYYADSVKG

SEQ ID NO: 620 - protein, 18 aa, Artificial Sequence
  Description of Artificial Sequence: Synthetic peptide
EGALGSKTNCGWVGNFGY

SEQ ID NO: 621 - protein, 9 aa, Artificial Sequence
  Description of Artificial Sequence: Synthetic peptide
FTFDDFDMG

SEQ ID NO: 622 - protein, 16 aa, Artificial Sequence
  Description of Artificial Sequence: Synthetic peptide
TISDDGSTYYADSVKG

SEQ ID NO: 623 - protein, 18 aa, Artificial Sequence
  Description of Artificial Sequence: Synthetic peptide
EGALGSKTNCGWVGNFGY

SEQ ID NO: 624 - protein, 9 aa, Artificial Sequence
  Description of Artificial Sequence: Synthetic peptide
FTFDDFDMG

SEQ ID NO: 625 - protein, 16 aa, Artificial Sequence
  Description of Artificial Sequence: Synthetic peptide
TISDDGSTYYADSVKG

SEQ ID NO: 626 - protein, 18 aa, Artificial Sequence
  Description of Artificial Sequence: Synthetic peptide
EGALGSKTNCGWVGNFGY

SEQ ID NO: 627 - protein, 9 aa, Artificial Sequence
  Description of Artificial Sequence: Synthetic peptide
FTFSDRDMG

SEQ ID NO: 628 - protein, 16 aa, Artificial Sequence
  Description of Artificial Sequence: Synthetic peptide
TISDDGSTYYADSVKG

SEQ ID NO: 629 - protein, 18 aa, Artificial Sequence
  Description of Artificial Sequence: Synthetic peptide
EGALGSKTNCGWVGNFGY

SEQ ID NO: 630 - protein, 7 aa, Artificial Sequence
  Description of Artificial Sequence: Synthetic peptide
YGYNYIG

SEQ ID NO: 631 - protein, 17 aa, Artificial Sequence
  Description of Artificial Sequence: Synthetic peptide
VIYIGGGDTYYADSVKG

SEQ ID NO: 632 - protein, 20 aa, Artificial Sequence
  Description of Artificial Sequence: Synthetic peptide
RYCVGSVYACLRGGHDEYAH

SEQ ID NO: 633 - protein, 7 aa, Artificial Sequence
  Description of Artificial Sequence: Synthetic peptide
YGYNYIG

SEQ ID NO: 634 - protein, 17 aa, Artificial Sequence
  Description of Artificial Sequence: Synthetic peptide
VIYTGGGDTYYADSVKG

SEQ ID NO: 635 - protein, 20 aa, Artificial Sequence
  Description of Artificial Sequence: Synthetic peptide
RYCVGSVYACLRGGHDEYAH

SEQ ID NO: 636 - protein, 9 aa, Artificial Sequence
  Description of Artificial Sequence: Synthetic peptide
FTFDDFDMG

SEQ ID NO: 637 - protein, 16 aa, Artificial Sequence
  Description of Artificial Sequence: Synthetic peptide
TISDDGSTYYANSVKG

SEQ ID NO: 638 - protein, 18 aa, Artificial Sequence
  Description of Artificial Sequence: Synthetic peptide
EGALGSKTNCGWVGNFGY

SEQ ID NO: 639 - protein, 9 aa, Artificial Sequence
  Description of Artificial Sequence: Synthetic peptide
FTFDDFDMG

SEQ ID NO: 640 - protein, 16 aa, Artificial Sequence
  Description of Artificial Sequence: Synthetic peptide
TISDDGSTYYADSVKG

SEQ ID NO: 641 - protein, 18 aa, Artificial Sequence
  Description of Artificial Sequence: Synthetic peptide
EGALGSKMNCGWVGNFGY

SEQ ID NO: 642 - protein, 119 aa, Artificial Sequence; identical to SEQ ID NO: 12
  Description of Artificial Sequence: Synthetic polypeptide

SEQ ID NO: 643 - protein, 116 aa, Artificial Sequence; identical to SEQ ID NO: 24
  Description of Artificial Sequence: Synthetic polypeptide

SEQ ID NO: 644 - protein, 122 aa, Artificial Sequence; identical to SEQ ID NO: 16
  Description of Artificial Sequence: Synthetic polypeptide

SEQ ID NO: 645 - protein, 125 aa, Artificial Sequence; identical to SEQ ID NO: 20
  Description of Artificial Sequence: Synthetic polypeptide

SEQ ID NO: 646 - protein, 124 aa, Artificial Sequence; identical to SEQ ID NO: 28
  Description of Artificial Sequence: Synthetic polypeptide

SEQ ID NO: 647 - protein, 124 aa, Artificial Sequence; identical to SEQ ID NO: 36
  Description of Artificial Sequence: Synthetic polypeptide

SEQ ID NO: 648 - protein, 122 aa, Artificial Sequence; identical to SEQ ID NO: 40
  Description of Artificial Sequence: Synthetic polypeptide

SEQ ID NO: 649 - protein, 125 aa, Artificial Sequence; identical to SEQ ID NO: 32
  Description of Artificial Sequence: Synthetic polypeptide

SEQ ID NO: 650 - protein, 121 aa, Artificial Sequence
  Description of Artificial Sequence: Synthetic polypeptide
QVQLQESGGGLVQPGGSLRLSCAASGFTFSLYDMSWVRQAPGKGLEWVSGINSGGYSTYYAASAKGRFTISRDNAKNTLYLQLSSVKTEDTAMYYCAQRGLTSPYVIPNIRLQGTQVTVSS

SEQ ID NO: 651 - protein, 130 aa, Artificial Sequence
  Description of Artificial Sequence: Synthetic polypeptide
EVQLVESGGRLVQAGDSLRLSCVASGKSFSDYPLGWFRQAPGKAREYVAHISWSGKLTYYRSTVKGRFTISRDNAENKLYLQMNALKPEDTAVYYCAAMKLFNYGGRYCVLKPLTMYQQWSQGTQVTVSS

SEQ ID NO: 652 - protein, 122 aa, Artificial Sequence
  Description of Artificial Sequence: Synthetic polypeptide
EVQLVESGGGLVQAGGSLRLSCAASGRSFSGYAIGWFRQAPGKEREFVAVVSWRGSSTYYADSVKGRFTISRDNAKGTVYLQMNSLKPEDTAAYYCAAVPSGRSWYGRNRYWGQGTQVTVSS

SEQ ID NO: 653 - protein, 122 aa, Artificial Sequence
  Description of Artificial Sequence: Synthetic polypeptide
EVQLVESGGGLVQAGGSLRLSCVISGRSINYYRMGWFRQAPGNRRQFVAAIKWGGDGVYADSVKGRFTISRDNTKNTVYLQMDSLKPEDTGTYYCAKMPLSSWSRGGYLEVWGQGTLVTVSS

SEQ ID NO: 654 - protein, 124 aa, Artificial Sequence
  Description of Artificial Sequence: Synthetic polypeptide
EVQLVESGGGLVQAGDSLRLSCAASERFSWGNYAMYWFRQAPGKEREFVAAIGRNSMATYYRDSAKGRFVISRDNAKNTLYLEMNALKPEDTARYYCAAKFMVADGWSRQYDYWGQGTLVTVSS

SEQ ID NO: 655 - protein, 119 aa, Artificial Sequence
  Description of Artificial Sequence: Synthetic polypeptide
EVQLVESGGGLVQAGGALRLSCAASGRTFRRFMGWFRQAPGKEREFVAAINWPGGGTYYGDSVKGRFTISRDNAKNTVYLQMNSLKPEDTANYYCAATRKYNLYKFADWGQGTQVTVSS

SEQ ID NO: 656 - protein, 122 aa, Artificial Sequence
  Description of Artificial Sequence: Synthetic polypeptide
EVQLVESGGRLVQAGDSLRLSCVASGRIFNTYSMGWFRQVPGKERDFVAAIRWSGGTTYYTDSVKGRFTISRDNAKNTVYLQMNSLKPEDTAVYYCWVRVRLSNTALLQRYWGQGTLVTVSS

SEQ ID NO: 657 - protein, 122 aa, Artificial Sequence
  Description of Artificial Sequence: Synthetic polypeptide
EVQLVESGGGLVQAGGSLRLFCASSERTFGDYPIGWFRQAPGKEREFVASISWGGSRQYYTDSVKGRFTITRDNDKNTVYLQMNSLKPEDTAVYYCWVRVRLSNTALLQRYWGQGTLVTVSS

SEQ ID NO: 658 - protein, 117 aa, Artificial Sequence
  Description of Artificial Sequence: Synthetic polypeptide
EVQLVESGGGLVQTGGSLRLSCAASGRTFNSYAMGWFRQSPGKEREFVAVITWNSGRTYYADSVKGRFTISRDNAKNTVYLQMNSLKPEDTAVYYCNSAPWAHNREWGQGTLVTVSS

SEQ ID NO: 659 - protein, 121 aa, Artificial Sequence
  Description of Artificial Sequence: Synthetic polypeptide
EVQLVESGGGLVQAGGSLRLSCAASGLTFRTYYMSWFRQAPGKEREFVGVISWIGSTTLYADSVKGRFSISRDNAKNTVYLQMNNLKPEDTAVYYCAANFLREGKREPRYWGQGTQVTVSS

SEQ ID NO: 660 - protein, 116 aa, Artificial Sequence
  Description of Artificial Sequence: Synthetic polypeptide
EVQLVESGGRLVQAGDSLRLSCVASGRIFNTYSMGWFRQVPGKERDFVAAIRWSGGTTYYTDSVKGRFTISRDNAKNTVYLQMNSLKPEDTAVYYCYLRVFARRYWGQGTQVTVSS

SEQ ID NO: 661 - protein, 122 aa, Artificial Sequence
  Description of Artificial Sequence: Synthetic polypeptide
EVQLVESGGGLVQAGGSLRLSCAASGRTLSTYAMGWFRQAPGKEREFVAAIRWASGRTYYGDSVKGRFTISRDSAKNTVYLQMNSLKPEDTAVYYCAARSRPYLNYGDFGYWGQGTQVTVSS

SEQ ID NO: 662 - protein, 120 aa, Artificial Sequence
  Description of Artificial Sequence: Synthetic polypeptide
EVQLVESGGGLVQAGGSLRLSCAASGRTISTYAMVWFRQASGKEREFVGVISRSGDRTYYADSVKGRFTISRDNLGNIVRLQLNSLKPEDTAVYYCARGGYTGIETITARGRGTLVTVSS

SEQ ID NO: 663 - protein, 124 aa, Artificial Sequence
  Description of Artificial Sequence: Synthetic polypeptide
EVQLVESGGGLVQTGDSLRLSCAAPESIFNNNAVYWYRQFPGKEREYVGLITIGGRTGYADSVKGRFTISRDNANNVAFLQMDSLKPEDTAVYYCATGLKFGFNFYSKTAYDYWGQGTQVTVSS

SEQ ID NO: 664 - protein, 122 aa, Artificial Sequence
  Description of Artificial Sequence: Synthetic polypeptide
EVQLVESGGRLVQAGDSLRLSCVASGRIFNTYSMGWFRQVPGKERDFVAAIRWSGGTTYYTDSVKGRFTISRDNAKNTVYLQMKDLKPQDTAVYYCAAVPSGRSWYGRNRYWGQGTLVTVSS

SEQ ID NO: 665 - protein, 125 aa, Artificial Sequence
  Description of Artificial Sequence: Synthetic polypeptide
EVQLVESGGGLVQAGGSLRLSCVSSGRTFGYVAMGWFRQAPGKEREFVASINWSGGSTAYADSVKGRFTISRDNAKNTVYLQMNSLKPEDTAVYYCAGSTRFYIATMEQGSYDYWGQGTQVTVSS

SEQ ID NO: 666 - protein, 123 aa, Artificial Sequence
  Description of Artificial Sequence: Synthetic polypeptide
EVQLVESGGSVVQPGDSLRLACTASGRSFRSYAIGWFRQASGKERVFVAAISYDGRRTYYGRSLKDRFTISRDNAKNTVYLQMNSLKPEDTAVYYCATHRSGTMFARYGMDYWGKGTLVTVSS

SEQ ID NO: 667 - protein, 120 aa, Artificial Sequence
  Description of Artificial Sequence: Synthetic polypeptide
EVQLVESGGGLVQAGGSLRLSCAASGRTFSSYAMGWFRQAPGKEREFVTAISRSGGYTSYADSVKGRFTISRDNAKNTVYLQMNSLKPEDTAVYYCAKLIAPFYYGMDYWTKGTQVTVSS

SEQ ID NO: 668 - protein, 121 aa, Artificial Sequence
  Description of Artificial Sequence: Synthetic polypeptide
EVQLVESGGGLMQAGGALRLSCTASGPTFTSYTMGWFRQSPGKRREFVAVISKGGRTYYADSVKGRFTISRDNAKNTFYLQMSSLKPEDTAVYYCAGQRVGATSKYEYDYWGQGTQVTVSS

SEQ ID NO: 669 - protein, 120 aa, Artificial Sequence
  Description of Artificial Sequence: Synthetic polypeptide
EVQLVESGGGLVRAGGSLRLSCAASGFTFSTDWMYWVRRAPGKGLEWVSLINTDGTSTSYTKSVKGRFTVSRDNAKNTLYLQMNSLKPEDTALYYCARGRTYWFYAMDYWGKGTQVTVSS

SEQ ID NO: 670 - protein, 123 aa, Artificial Sequence
  Description of Artificial Sequence: Synthetic polypeptide
EVQLVESGGGLVQAGDSLRLSCAASGRISNYAMGWFRQAPGKEREFVAVITRSGGSTYYADSVKGRFTISRDNGKNTIDLQMNRLKPEDTAVYYCAVRRSQKLVTFGAEYPWWGQGTLVTVSS

SEQ ID NO: 671 - protein, 116 aa, Artificial Sequence
  Description of Artificial Sequence: Synthetic polypeptide
EVQLVESGGGLVQAGGSLRLSCTTSGRTGTHYAMGWFRQAPGKEREFVSLILWNGEFTTYKDSVKGRFTISREKGENTVYLQMNSLKPEDTAVYYCYLRVFARRYWGQGTQVTVSS

SEQ ID NO: 672 - protein, 123 aa, Artificial Sequence
  Description of Artificial Sequence: Synthetic polypeptide
EVQLVESGGGLVQPGGSLRLSCEVSGFTFSNYWMYWIRQAPGKGLEWVSHINTNGGNTYYRHSVKGRFTISRDNAKNTLYLQMNGLKSEDTAVYYCAKANSDVGLGYYGMDYWGKGTQVTVSS

SEQ ID NO: 673 - protein, 119 aa, Artificial Sequence
  Description of Artificial Sequence: Synthetic polypeptide
EVQLVESGGGSVQPGGSLRLSCAAPESIFNNNAVYWYRQFPGKEREYVGLITIGGRTGYADSVKGRFTISRDNANNVAFLQMDNLKPEDTAVYYCAARPGYWSSSYDYWGQGTQVTVSS

SEQ ID NO: 674 - protein, 116 aa, Artificial Sequence
  Description of Artificial Sequence: Synthetic polypeptide
EVQLVESGGGLVQAGGSLRLSCVFSGRAPASYAMAWFRQAVGNEREFVAAINWSGRRTYYADSVKGRFTISKDNAQNTAYLQMTNLEPEDTATYYCNAYLSGTYYWGQGTQVTVSS

SEQ ID NO: 675 - protein, 122 aa, Artificial Sequence
  Description of Artificial Sequence: Synthetic polypeptide
EVQLVESGGGLVRAGDSLRLSCAVSGLASSSFFMTWFRQGQGKEREFVATISWTGRTSYYAASVKGRFTVSRDNAKNTVYLQMNSLNSEDTAVYFCAAYPRTLVRNREPIHWGQGTQVTVSS

SEQ ID NO: 676 - protein, 121 aa, Artificial Sequence
  Description of Artificial Sequence: Synthetic polypeptide
QVQLQESGGGSVQAGGSLRLSCAASGFTFDDSDMGWYRQAPGNECDLVSTISSDGSTYYADSVKGRFTISQDNAKNTVYLQMDSVKPEDTAVYYCAADFMIAIQAPGAGCWGQGTQVTVSS

SEQ ID NO: 677 - protein, 117 aa, Artificial Sequence
  Description of Artificial Sequence: Synthetic polypeptide
QVQLQESGGGSVPAGGSLKLSCAASGFSFSSYPMTWARQAPGKGLEWVSTIASDGGSTAYAASVEGRFTISRDNAKSTLYLQLNSLKTEDTAMYYCTKGYGDGTPAPGQGTQVTVSS

SEQ ID NO: 678 - protein, 121 aa, Artificial Sequence
  Description of Artificial Sequence: Synthetic polypeptide
QVQLQESGGGSVQTGGSLRLSCTASGFTFDDREMNWYRQAPGNECELVSTISSDGSTYYADSVKGRFTISQDNAKNTVYLQMDSVKPEDTAVYYCAADFMIAIQAPGAGCWGQGTQVTVSS

SEQ ID NO: 679 - protein, 125 aa, Artificial Sequence
  Description of Artificial Sequence: Synthetic polypeptide
QVQLQESGGGSVQAGGSLRLSCTASGFTFDDSDMGWYRQAPGNECELVSTISSDGNTYYTDSVKGRFTISQDNAKNTVYLQMNSLGPEDTAVYYCAAEPRGYYSNYGGRRECNYWGQGTQVTVSS

SEQ ID NO: 680 - protein, 117 aa, Artificial Sequence
  Description of Artificial Sequence: Synthetic polypeptide
QVQLQESGGGSVQAGGSLRLSCAASGFSFSSYPMTWARQAPGKGLEWVSTIASDGGSTAYAASVEGRFTISRDNAKSTLYLQLNSLKTEDTAMYYCTKGYGDGTPAPGQGTQVTVSS

SEQ ID NO: 681 - protein, 120 aa, Artificial Sequence
  Description of Artificial Sequence: Synthetic polypeptide
QVQLQESGGGAVQAGGSLRLSCAASGFTFSNAHMSWVRQAPGKGREWISSIYSGGSTWYADSVKGRFTISRDNSKNTLYLQLNSLKTEDTAMYYCAENRLHYYSDDDSLRGQGTQVTVSS

SEQ ID NO: 682 - protein, 121 aa, Artificial Sequence
  Description of Artificial Sequence: Synthetic polypeptide
QVQLQESGGGLVQPGGSLRLSCAASGFTFDDREMNWYRQAPGNECELVSTISSDGSTYYADSVKGRFTISQDNAKNTVYLQMDSVKPEDTAVYYCAADFMIAIQAPGAGCWGQGTQVTVSS

SEQ ID NO: 683 - protein, 127 aa, Artificial Sequence; identical to SEQ ID NO: 64
  Description of Artificial Sequence: Synthetic polypeptide

SEQ ID NO: 684 - protein, 124 aa, Artificial Sequence
  Description of Artificial Sequence: Synthetic polypeptide
QVQLQESGGGSVQAGGSLRLSCTASGFTFDDSDMGWYRQAPGGECELVTISSDGSTYYADSVKGRFTISQDNAKNTVYLQMNSLKPEDTAVYYCAAEPRGYYSNYGGRRECNYWGQGTQVTVSS

SEQ ID NO: 685 - protein, 127 aa, Artificial Sequence
  Description of Artificial Sequence: Synthetic polypeptide
QVQLQESGGGSVQAGGSLRLSCAASGSIYSSAYIGWFRQAPGKKREGVAGIYTRDGSTAYADSVKGRFTISQDSAKKTVYLQMNSLKPEDTAMYYCAAGRRTKSYVYIFRPEEYNYWGQGTQVTVSS

SEQ ID NO: 686 - protein, 120 aa, Artificial Sequence
  Description of Artificial Sequence: Synthetic polypeptide
QVQLQESGGGSVQAGGSLRLSCAASGFTFSSAHMSWVRQAPGKGREWIASIYSGGGTFYADSVKGRFTISRDNAKNTLYLQLNSLKTEDTAMYYCATNRLHYYSDDDSLRGQGTQVTVSS

SEQ ID NO: 687 - protein, 120 aa, Artificial Sequence
  Description of Artificial Sequence: Synthetic polypeptide
QVQLQESGGGSVQAGGSLRLSCAASGFTFSNAHMSWVRQAPGKGREWISSIYSGGSTWYADSVKGRFTISRDNSKNTLYLQLNSLKTEDTAMYYCAENRLHYYSDDDSLRGQGTQVTVSS

SEQ ID NO: 688 - protein, 125 aa, Artificial Sequence
  Description of Artificial Sequence: Synthetic polypeptide
QVQLQESGGGSVQAGGSLRLSCTASRFIFDDSDMGWYRQAPGNECELVSTISSDGSTYYADSVKGRFTISRDNAKNTVYLQMNSLKPEDTAVYYCAAEPRGYYSNYGGRRECNYWGQGTQVTVSS

SEQ ID NO: 689 - protein, 124 aa, Artificial Sequence
  Description of Artificial Sequence: Synthetic polypeptide
QVQLQESGGGSVQAGGSLKLSCTVSGFTADDSDMGWYRQGPGNECELVTISSDGSTYYADSVKGRFTISQDNAKNTVYLQMNSLKPEDTAVYYCAAEPRGYYSNYGGRRECNYWGQGTQVTVSS

SEQ ID NO: 690 - protein, 120 aa, Artificial Sequence; identical to SEQ ID NO: 48
  Description of Artificial Sequence: Synthetic polypeptide

SEQ ID NO: 691 - protein, 120 aa, Artificial Sequence
  Description of Artificial Sequence: Synthetic polypeptide
QVQLQESGGGLVQPGGSLRLSCVASGFTFSNAHMSWVRQAPGKGREWISSIYSGGSTWYADSVKGRFTISRDNSKNTLYLQLNSLKTEDTAMYYCAENRLHYYSDDDSLRGQGTQVTVSS

SEQ ID NO: 692 - protein, 120 aa, Artificial Sequence
  Description of Artificial Sequence: Synthetic polypeptide
QVQLQESGGGLVQPGGSLRLSCAASGFTFSNAHMSWVRQAPGKGREWISSIYSGGSTWYADSVKGRFTISRDNSKNTLYLQLNSLKTEDTAMYYCAENRLHYYSDDDSLRGQGTQVTVSS

SEQ ID NO: 693 - protein, 117 aa, Artificial Sequence
  Description of Artificial Sequence: Synthetic polypeptide
QVQLQESGGGLVQPGGSLRLSCAASGFTFSSYPMTWARQAPGKGLEWVSTIASDGGSTAYAASVEGRFTISRDNAKSTLYLQLNSLKTEDTAMYYCTKGYGDGTPAPGQGTQVTVSS

SEQ ID NO: 694 - protein, 121 aa, Artificial Sequence; identical to SEQ ID NO: 52
  Description of Artificial Sequence: Synthetic polypeptide

SEQ ID NO: 695 - protein, 125 aa, Artificial Sequence; identical to SEQ ID NO: 60
  Description of Artificial Sequence: Synthetic polypeptide

SEQ ID NO: 696 - protein, 119 aa, Artificial Sequence; identical to SEQ ID NO: 56
  Description of Artificial Sequence: Synthetic polypeptide

SEQ ID NO: 697 - protein, 117 aa, Artificial Sequence; identical to SEQ ID NO: 44
  Description of Artificial Sequence: Synthetic polypeptide

SEQ ID NO: 698 - protein, 117 aa, Artificial Sequence
  Description of Artificial Sequence: Synthetic polypeptide
QVQLQESGGGLVQPGGSLRLSCAASGFSFSSYPMTWARQAPGKGLEWVSTIASDGGSTAYAASVEGRFTISRDNAKSTLYLQLNSLKTEDTAMYYCTKGYGDGTPAPGQGTQVTVSS

SEQ ID NO: 699 - protein, 127 aa, Artificial Sequence
  Description of Artificial Sequence: Synthetic polypeptide
QVQLQESGGGSVLAGGSLRLSCVASGYGYNYIGWFRQTPGKEREGVAVIYTGGGDTYYADSVKGRFTASRDNAKSTLYLQMNSLEPEDTAMYYGVARYCVGSVYACLRGGHDEYAHWGQGTQVTVSS

SEQ ID NO: 700 - protein, 134 aa, Artificial Sequence
  Description of Artificial Sequence: Synthetic polypeptide
QVQLQESGGGSVQPGGSLRLSCAASGSTYANYLMGWFRQAPGKEREGVAAIYSGGGSTYYADSVKGRFTISQDNAKNTLYLQMNSLKPEDTAMYYCAAASAVKGDKGDIVVVVTGTQRMEYDYWGHGTQVTVSS

SEQ ID NO: 701 - protein, 132 aa, Artificial Sequence
  Description of Artificial Sequence: Synthetic polypeptide
QVQLQESGGGSVQAGASLRLSCSVSGFTFDESVMSWLRQGPGNECDAVAIISSDDNTYYDDSVKGRFTISEDNAKNMVYLQMNSLKPEDTAVYYCAARRRRPVYDSDYELRPRPLCGDFGVWGQGTQVTVSS

SEQ ID NO: 702 - protein, 129 aa, Artificial Sequence
  Description of Artificial Sequence: Synthetic polypeptide
QVQLQESGGGSVQAGGSLRLSCIGSGLPFDEDDMGWYRQAPGNECELVSSISSDGTAYYADSVKGRFTISRDNAKNTVLLQMNSLKPEDTAVYYCAAGVHRQFGGSSSCGDAFYGMDYWGKGTQVTVSS

SEQ ID NO: 703 - protein, 124 aa, Artificial Sequence
  Description of Artificial Sequence: Synthetic polypeptide
QVQLQESGGGSVQAGGSLRLSCVASGDVYGRNSMAWFRQAPGKEREGVAVGYSVVTTTYYADSVKGRFTISEDNDKNTVYLEMNSLKPEDTAMYYCAADGNLWRGLRPSEYTYWGQGTQVTVSS

SEQ ID NO: 704 - protein, 128 aa, Artificial Sequence
  Description of Artificial Sequence: Synthetic polypeptide
QVQLQESGGGSVQAGGSLRLSCATSGFPYSRYCMGWFRQAPGKEREGVAAIEPDGSTSYADSVKGRFTISQDNAVNTLYLQMNNLKPEDTAMYYCAADERCFYLKDYDLRRPAQYRYWGQGTQVTVSS

SEQ ID NO: 705 - protein, 132 aa, Artificial Sequence
  Description of Artificial Sequence: Synthetic polypeptide
QVQLQESGGGLVQPGGSLRLSCTVSGFTFDESDMGWLRQNPGNECGVVSVITSDDNPYYDDSVKGRFTISEDNAKNMVYLQMNSLKPEDTGVYYCATRSRQPVYSRDYELRPRPLCGDFGVWGQGTQVTVSS

SEQ ID NO: 706 - protein, 126 aa, Artificial Sequence
  Description of Artificial Sequence: Synthetic polypeptide
QVQLQESGGGSVQAGGSLRLSCTASGFTFDDFDMGWYRQAPGNECELVSTISDDGSTYYADSVKGRSSISRDNAKNTVYLQMNRLKPEDTGVYYCAAEGALGSKTNCGWVGNFGYWGQGTQVTVSS

SEQ ID NO: 707 - protein, 126 aa, Artificial Sequence
  Description of Artificial Sequence: Synthetic polypeptide
QVQLQESGGGSVQAGGSLRLSCAASGFTFDDFDMGWYRQAPGNECELVSTISDDGSTYYADSVKGRSSISRDNAKNTVYLQMNSLKPEDTAVYYCAAEGALGSKTNCGWVGNFGYWGQGTQVTVSS

SEQ ID NO: 708 - protein, 126 aa, Artificial Sequence
  Description of Artificial Sequence: Synthetic polypeptide
QVQLQESGGGLVQPGGSLRLSCAASGFTFDDFDMGWYRQAPGNECELVSTISDDGSTYYADSVKGRSSISRDNAKSTVYLQMNRLKPEDTGVYYCAAEGALGSKTNCGWVGNFGYWGQGTQVTVSS

SEQ ID NO: 709 - protein, 126 aa, Artificial Sequence
  Description of Artificial Sequence: Synthetic polypeptide
QVQLQESGGGLVQPGGSLKLSCAASGFTFSDRDMGWYRQAPGNECERVSTISDDGSTYYADSVKGRSSISRDNAKNTVYLQMNSLKPEDTAVYYCAAEGALGSKTNCGWVGNFGYWGQGTQVTVSS

SEQ ID NO: 710 - protein, 127 aa, Artificial Sequence
  Description of Artificial Sequence: Synthetic polypeptide
QVQLQESGGGSVLAGGSLRLSCVASGYGYNYIGWFRQTPGKEREGVAVIYIGGGDTYYADSVKGRFTASRDNAKSTLYLQMNSLEPEDTAMYYCVARYCVGSVYACLRGGHDEYAHWGQGTQVTVSS

SEQ ID NO: 711 - protein, 127 aa, Artificial Sequence
  Description of Artificial Sequence: Synthetic polypeptide
QVQLQESGGGSVLAGGSLRLSCVASGYGYNYIGWFRQTPGKEREGVAVIYTGGGDTYYADSVKGRFTASRDNAKSTLYLQMNSLEPEDTAMYYCVARYCVGSVYACLRGGHDEYAHWGQGTQVTVSS

SEQ ID NO: 712 - protein, 126 aa, Artificial Sequence
  Description of Artificial Sequence: Synthetic polypeptide
QVQLQESGGGSVQAGGSLRLSCAASGFTFDDFDMGWYRQAPGNECELVSTISDDGSTYYANSVKGRSSISRDNAKNMVYLQMNSLKPEDTAVYYCAAEGALGSKTNCGWVGNFGYWGQGTQVTVSS

SEQ ID NO: 713 - protein, 126 aa, Artificial Sequence
  Description of Artificial Sequence: Synthetic polypeptide
QVQLQESGGGSVQAGGSLRLSCTASGFTFDDFDMGWYRQAPGNECELVSTISDDGSTYYADSVKGRSSISRDNAKNTVYLQMNRLKPEDTGVYYCAAEGALGSKMNCGWVGNFGYWGQGTQVTVSS

SEQ ID NO: 714 - DNA, 357 bp, Artificial Sequence
  Description of Artificial Sequence: Synthetic polynucleotide
caggtccagttgcaggagagcggtggcggtagcgtgcaggccggtggcagtctgcgcctttcctgcgtaggcagcggttacacctacgacacctccgacatgagctggtataggcaggccccaggcaaggagagggaatttgtctccgatattgattccggcgactgggctgcctacgctgatgccgtgaagggccgcttcacaatcagccgtgacaacgccaaaaagaccgtgtatctgcaaatgaacagtctggaacctgaggacacggcaatgtactattgcaaagcctcttattggaagtggggcaagctcaataacttctggggtcccggcacacaggtgaccgtgtcctct

SEQ ID NO: 715 - DNA, 348 bp, Artificial Sequence
  Description of Artificial Sequence: Synthetic polynucleotide
caggtgcagctccaggaaagcggcggaggcctggtccagcctggcgggagcttgcgtctgtcctgcgtggcaagcggattcacgtttagtaattactggatcttttgggtacggcaggcagctggcaaggggcttgagtggctttcaacatccaacacaggtggcgatactacaaaatacgcggattctgtaaaaggccggttcacgatcagtcgcgactccgcgaagaacaccgaatacctccagatgaactccttgaagcctgaagacaccgcagtctactattgcgaaaccggacgctgcgccaggtctggaggttaccagggcacgcaggtgaccgtttcctcc

SEQ ID NO: 716 - DNA, 366 bp, Artificial Sequence
  Description of Artificial Sequence: Synthetic polynucleotide
caggtgcagctccaggagtccggcgggggactggtccagccaggaggttctttgaagctgagttgcgccgcttctggttttagattctctaactacggcatgtcttgggttcgccaagcgcccggagagggcctggagtgggtcagttacattaacggggacggctcccgcacccactacgctgactccgtcaaagggcggttcaccatctcacgtgacaacgctaagaacaccctgtacctccagctgaacagcctgaagacagaggatacagccatgtattactgtgagaagggtctgtctcgcgacggttggtccctcagcgctgccagtcgcgggcaggggacccaagtgacagtcagctct

SEQ ID NO: 717 - DNA, 375 bp, Artificial Sequence
  Description of Artificial Sequence: Synthetic polynucleotide
caggtccaactgcaagagagcggcgggggcagcgtgcagactggaggctccctgcgtctgtcctgtgcggtgtcagggtatacaacctattcattcaactatatgggatggttccgccaggctccgggcaaggagcgcgaaggcgtggcggtaatctacaccggcgggggatctaccctgtatgctgattctgttaaagggcgcttcactatctcccaggacaacgccaagaacactgtgtacctccagatgaactccctgaaacccgaagataccgcgatgtattactgcgctgccgacgatcagcgcttcgcctccccgctctacgcctacttcggttactggggccagggcactcaggtgaccgtgtctagc

SEQ ID NO: 718 - DNA, 372 bp, Artificial Sequence
  Description of Artificial Sequence: Synthetic polynucleotide
caagtgcaactccaggagagcggtggaggctctgtgcaggtgggtggcagtctgcgtctctcttgcgctacctctggtgacaccaagagcatccgttgtatgggctggttccgtcaaactcctggtaaggagcgcgaaggcatcgccgctattgatcgcgagggttttgccacctacgctgatagcgtgtatgatcgcttcaccatcgcccaggataacgcccagaataccctgtacctggagatgaatgccctgaagcctgaggatacagcaatgtattactgcgctgcccagaatatgtgccgcgtagtgagaggtgccatgacgggggtggactattggggcaagggcacccaagtgactgtgtccagc

SEQ ID NO: 719 - DNA, 372 bp, Artificial Sequence
  Description of Artificial Sequence: Synthetic polynucleotide
caagttcagctgcaagagtctgggggcggtagcgtgcaggcgggtgggtccctgcgcctctcttgcgctgcctccgagtacacagcatctcggtactgcatggcctggtttcgtcaggctccgggtaaggagcgggagggcgttgccgctattcatccgggcggaggtacgacctactatgcagactccgtaaagggtcgcttctccatcagccaggattctgccgacaacaccttgtacctccagatgaactcactgaaacctgaggataccgcgatgtattactgcgcggctggctctctgtgggtgcccttcggcgaccgctgtgctgccaactattggggccagggaacccaggttacagtgtcttcc

SEQ ID NO: 720 - DNA, 366 bp, Artificial Sequence
  Description of Artificial Sequence: Synthetic polynucleotide
caggttcagttgcaggagtccggcggtggcagcgtacaggccgggggctccctgagacttagttgcgcagcgtccggttacgagtactgccgtattcacatgacttggtataggcaaggccctggtaaggaacgcgagttcgtttcttccatcgggagtgatggccgtaaaacctacgccaacagcgtgaccggacgtttcaccatcagtcgtgacaacgctaaccacacggtttacttgcagatgaactccctctcccctgaggacaccgccatgtactattgtaagaccgagtacctgtatggcctcggctgcccagatggtagcgcctactggggccaggggacccaggtcaccgtttccagt

SEQ ID NO: 721 - DNA, 375 bp, Artificial Sequence
  Description of Artificial Sequence: Synthetic polynucleotide
caggtccagttgcaggagtctggaggtggatcagtgcaggttgggggttcactgaaacttagctgtgccgcttctgggtatacatattctagctactattgtatgggctggtttcgccaggctcctggaaaggagcgcgaaggggtggcggccatcgactccgacggctccacatcctacgcggactccgtgaagggccgctttacaatcagtcaggatgacgctaagaacacgctgtacctccagatgaatagcctgaagcccgaagatacggcgatgtactattgcgccgcgtcttacgaagtagtggactgctatccgtccggctatggccaagattactggggaaaaggaactcaagtgaccgtgagttcc

SEQ ID NO: 722 - DNA, 363 bp, Artificial Sequence
  Description of Artificial Sequence: Synthetic polynucleotide
caggtgcagttgcaggagagcgggggcggtctggtccagccgggcgggtcactgcgcctgtcttgtgccgcttcaggatttacctttagtttgtacgacatgagttgggttaggcaagcgcctggcaagggtctggagtgggtgtctggcatcaactcaggaggctatagcacctattacgcggcctccgccaagggccgcttcaccatctctagggataacgcaaagaacactctttacctccagctcagctctgttaagactgaggatactgccatgtattactgtgcccagcgcggcctcaccagcccgtatgtgattccgaacattcgcttgcagggcacacaggtgactgtgtccagc

SEQ ID NO: 723 - DNA, 390 bp, Artificial Sequence
  Description of Artificial Sequence: Synthetic polynucleotide
gaggtccaactggtggagagcggcggaaggctggtgcaggctggcgactccctgcgcttgagctgtgtggcaagcggaaagtccttttccgattaccctctcggttggttccgtcaggctcctggaaaagctagggagtatgtggcccacatctcttggagcggcaaactgacttactatcgctcaacagtgaagggccggtttactatcagccgcgataacgctgaaaataaactgtacctccagatgaacgccctgaagcccgaggatactgccgtgtattactgtgctgccatgaagttgttcaactatggcgggcgttactgtgttctcaagcccctgacaatgtaccaacagtggagccagggtactcaggtcacagttagctcc

SEQ ID NO: 724 - DNA, 366 bp, Artificial Sequence
  Description of Artificial Sequence: Synthetic polynucleotide
gaggtccagctcgttgagagcggcgggggcctggtgcaggccggtggcagcctccgtctctcctgtgccgcttctggccgcagtttctccgggtatgctatcgggtggttcagacaggcaccaggcaaggagcgcgagtttgttgctgtcgtgagctggcggggttctagcacctactatgccgactcagtcaagggccgcttcacaattagcagggacaacgccaagggcactgtatacctccagatgaactccctgaagccagaggataccgccgcgtattactgcgctgccgtgccatctggccgctcctggtacggtaggaaccgttactggggtcagggaactcaggtcaccgtgtcctca

SEQ ID NO: 725 - DNA, 366 bp, Artificial Sequence
  Description of Artificial Sequence: Synthetic polynucleotide
gaagtgcagctcgttgaaagcggcgggggcctcgtgcaagctggaggctcacttcgcctttcttgtgtcatcagtggccgctctatcaattattaccggatgggctggttccgccaggcccctggcaaccgcaggcaattcgtggcggctatcaagtggggtggcgacggtgtgtacgccgactccgtgaaggggcgctttaccattagtcgggacaacaccaagaacaccgtatacttgcagatggacagtctgaagcccgaagacaccggaacatattactgcgccaaaatgcctctttctagctggtccagaggtggctaccttgaggtgtggggtcaaggcacgctggtgaccgtgtcttct

SEQ ID NO: 726 - DNA, 372 bp, Artificial Sequence
  Description of Artificial Sequence: Synthetic polynucleotide
gaagtgcaactcgtggaaagtggaggcggtctcgtccaggcgggggacagcctgcgtctgtcttgcgccgcatccgagcgtttttcttggggcaactatgctatgtattggttcaggcaggcccctggcaaggaacgcgagttcgtggctgccattggccgcaacagcatggccacgtattacagagatagcgccaagggccgcttcgtcatcagccgtgacaacgctaagaacaccctgtacctggaaatgaacgccttgaagcctgaagatactgctaggtactattgcgccgcgaagttcatggtggccgacggctggagcagacagtatgactactggggccagggcactctggtaacggtctcctcc

SEQ ID NO: 727 - DNA, 357 bp, Artificial Sequence
  Description of Artificial Sequence: Synthetic polynucleotide
gaagttcagcttgtggaaagcggcggtgggcttgtccaggctggtggagcgctgcgcctctcctgcgcagcgagtggcaggaccttccgccgtttcatgggttggtttcgccaggccccagggaaggagcgcgagtttgttgctgccatcaactggcctggaggtggcacctactatggcgatagcgtgaagggccgtttcacaatctccagggacaacgccaagaataccgtctacctgcaaatgaactccctgaagccggaggacaccgcgaactattactgcgccgcaacccgcaagtacaacctgtataaattcgcggactggggccagggcacccaggtgacagtgtcatct

SEQ ID NO: 728 - DNA, 366 bp, Artificial Sequence
  Description of Artificial Sequence: Synthetic polynucleotide
gaggtccagctcgtcgagtccggcgggcggctggtgcaggctggcgacagccttcgcctgtcctgtgtggcatccggcagaatctttaacacctactcaatgggttggtttaggcaggttcccggaaaggagagggatttcgtggctgccatcagatggtccggtggcaccacatattacactgattctgtcaaggggcgcttcaccattagtcgcgataacgcaaaaaacaccgtgtacctgcaaatgaatagcctgaagcctgaggacaccgccgtatattactgttgggtgcgcgttcgcctgagcaacacagccctgcttcagcgctactggggtcagggaaccttggttaccgtgtcaagc

SEQ ID NO: 729 - DNA, 366 bp, Artificial Sequence
  Description of Artificial Sequence: Synthetic polynucleotide
gaagtccagctcgtggagtccgggggaggtctggttcaagctgggggttctttgcgcctcttttgcgcgtccagcgagcgtactttcggagattacccaatcggatggttccgtcaagccccaggcaaggagcgcgagtttgtcgcgtccatcagctggggtggctcacgtcagtactatactgactccgttaagggccgcttcacgattacaagagataatgataagaacaccgtgtatctccagatgaactccctcaagcccgaggacactgctgtttactattgctgggtgcgggtgcgtctgtcaaacacggcactgcttcagcgctattggggacagggcaccctggtcaccgtctcctca

SEQ ID NO: 730 - DNA, 351 bp, Artificial Sequence
  Description of Artificial Sequence: Synthetic polynucleotide
gaagtccagctggtcgagtcaggcgggggactggtgcagactgggggtagtctgcgcctgagctgcgcagcttcaggaagaaccttcaactcctacgctatgggctggttcagacagagcccaggcaaagagcgggagttcgtggcggtgattacgtggaactctggccgcacgtactatgctgacagtgtcaaaggcagatttaccatcagtagggataacgccaagaacacagtgtatctccagatgaactctctgaagcccgaggatactgctgtgtattactgtaacagcgccccctgggctcacaatcgtgagtgggggcaggggaccctcgttaccgtcagcagc

SEQ ID NO: 731 - DNA, 363 bp, Artificial Sequence
  Description of Artificial Sequence: Synthetic polynucleotide
gaggtgcagctggtggaatctggtggagggctggtgcaggctggcggttccctccgtctgtcttgtgcggcctcagggctgaccttcaggacctactatatgtcatggttccgccaagcgcccggcaaggaacgcgagttcgtcggagtgatctcttggatcggctccactaccctctacgccgattctgtgaaaggtaggttttccatctcacgcgataatgctaagaacaccgtctacctccagatgaataacttgaaacccgaggacaccgccgtctactattgcgcggccaacttcctcagagagggaaagcgcgaacctcggtattggggacaagggacccaggtgaccgtttcctcc

SEQ ID NO: 732 - DNA, 348 bp, Artificial Sequence
  Description of Artificial Sequence: Synthetic polynucleotide
gaggtgcagttggttgagtctggcggaaggctcgttcaagctggtgacagcctgcggctgtcttgcgtcgcttctggacgcatcttcaacacatattcaatgggctggttcagacaggtgcctggcaaggagcgcgacttcgtggcagctatccgttggagcgggggcactacgtattacaccgattctgtgaaggggcgcttcacaatctccagggataatgcaaagaacaccgtgtaccttcagatgaacagcttgaagcctgaagataccgcagtgtactattgttatctgagggtgttcgctcggcgctattggggccagggcacacaggtgacagtgtcctcc

SEQ ID NO: 733 - DNA, 366 bp, Artificial Sequence
  Description of Artificial Sequence: Synthetic polynucleotide
gaagtgcagctggtcgagagcgggggtggacttgtgcaggctggtggctcccttaggctgagctgcgccgcttccggcagaactctctctacctatgctatgggttggttccgtcaggcccccggcaaggagcgcgagttcgtcgcggccatccgctgggcttctggccgtacttattacggtgacagcgtgaagggtcggttcaccatctctcgtgacagtgcgaaaaataccgtgtacctccagatgaactccctgaagccggaggacacggcggtttattactgcgcggccaggagcaggccttacctgaactacggagactttgggtactggggccaggggacccaggtcaccgtgtcatcc

SEQ ID NO: 734 - DNA, 360 bp, Artificial Sequence
  Description of Artificial Sequence: Synthetic polynucleotide
gaagtccagctcgtggagtctgggggtggactcgtacaagccgggggatcacttcgcttgtcctgcgcggcttctggcaggaccatctcaacttacgcaatggtttggttcaggcaagcctctggtaaggagcgtgagtttgtgggcgttatctcccgcagtggagaccgcacttactatgctgattctgtgaagggcagattcactatcagtcgcgataatctgggcaacattgtgcgtttgcagctcaattcacttaaacctgaagacacagccgtttattactgcgcacgcggcggatataccgggattgagacaattacggctcggggtcgcggcacattggtcaccgtgtccagc

SEQ ID NO: 735 - DNA, 372 bp, Artificial Sequence
  Description of Artificial Sequence: Synthetic polynucleotide
gaggttcagctcgttgagagtggtggaggcctcgtgcagaccggggattcccttcgcctttcctgtgcagctccagagtccatcttcaacaataacgccgtttactggtacaggcagttccccggcaaggagagggagtatgttggtctcatcaccatcggtggcaggaccgggtacgcggactctgtgaaaggccgctttaccatctccagagacaacgccaataacgtggcctttttgcagatggattccctcaagcccgaggatactgctgtctactattgtgccacgggcttgaagttcggcttcaacttctacagtaagactgcctacgactactggggacaagggacccaggtgaccgtcagctct

SEQ ID NO: 736 - DNA, 366 bp, Artificial Sequence
  Description of Artificial Sequence: Synthetic polynucleotide
gaggtgcagctcgtggagtctggaggtcgcctggtgcaggctggcgattccctgcgcctgtcctgtgtggcctctggtcgcattttcaacacttattctatgggttggttcagacaggttcctggaaaggaaagagacttcgtggcagccattcggtggagtggtggcaccacttattacacagactccgtgaagggtcgctttactatctctcgggataacgccaaaaacactgtctacctccagatgaaagacctgaagccccaggacaccgccgtctattactgtgctgccgtcccctctggccgcagctggtacggtcgcaaccgttactggggccagggcactctggtgaccgtcagctct

SEQ ID NO: 737 - DNA, 375 bp, Artificial Sequence
  Description of Artificial Sequence: Synthetic polynucleotide
gaggtgcagttggtggagagcggcggtggcctggtccaggcgggcgggtccctccgcctgagttgtgtgtcttcaggccggacctttggatatgtcgctatgggttggttccgtcaagccccaggtaaggaacgcgagttcgtggcgagcattaactggagcggcgggtccacggcctatgcggactccgtaaagggccggttcactatcagccgcgacaacgctaagaataccgtgtacttgcagatgaacagcctgaagcctgaggatacagccgtgtattactgcgctggatcaacccgcttctatatcgcgacgatggaacagggctcctacgattactggggccaaggtactcaggtgaccgtaagcagc

SEQ ID NO: 738 - DNA, 369 bp, Artificial Sequence
  Description of Artificial Sequence: Synthetic polynucleotide
gaggtgcaactggtggaatcaggaggctccgtggtccagccaggggacagccttcgtcttgcctgcaccgcctctggtcgcagtttcaggtcttacgcgattggctggtttaggcaggcatccggcaaggaaagggtgtttgtggctgccatctcttatgacggtaggcgcacctactatgggcgttcattgaaggaccgtttcactatctctcgggacaacgctaagaacacagtgtacttgcagatgaactccctcaagcccgaggacactgccgtgtactattgcgctacccatcgctccggtacaatgttcgctcggtatggtatggattactggggtaagggtactttggttaccgtgtccagc

SEQ ID NO: 739 - DNA, 360 bp, Artificial Sequence
  Description of Artificial Sequence: Synthetic polynucleotide
gaggtgcagctggtggagagcggcggtggcctggtgcaagcaggcggatctctgcgtctgtcttgtgctgcgtcaggccgcaccttctcctcttatgctatggggtggtttagacaagctcctggaaaggagagggagtttgtgactgccatctccagatccggtggatacactagctacgccgatagtgttaagggccggttcactatctctcgcgacaatgccaagaacaccgtgtatcttcagatgaactccctgaaacccgaggacaccgccgtctactattgtgcgaaactgatcgctccattctattacggcatggattactggaccaaggggacccaggtgacagtgtctagc

SEQ ID NO: 740 - DNA, 363 bp, Artificial Sequence
  Description of Artificial Sequence: Synthetic polynucleotide
gaagtgcagctggtggaaagcggcggaggtctgatgcaggcaggtggagcccttaggctctcttgtaccgcctctgggcctacttttacctcttatacgatgggctggttccgccaatctcctggcaagcgtcgcgagtttgtggccgtcatctccaaaggcgggcggacctattacgccgactccgtgaagggacgcttcactatttcccgcgacaacgctaagaataccttctatctccagatgtcctctctgaagcctgaggacacagcagtgtattactgcgccgggcagcgtgtgggcgcgactagcaagtatgagtatgattactgggggcagggcacccaagtgaccgtgtcatcc

SEQ ID NO: 741 - DNA, 360 bp, Artificial Sequence
  Description of Artificial Sequence: Synthetic polynucleotide
gaagtgcaactggtggagagcggagggggtctggtacgcgcaggtggctccctgaggctctcctgcgctgcgtccggcttcacttttagtaccgactggatgtactgggtaagacgcgctccaggaaaggggctggagtgggtgtcccttatcaacactgacgggacttctacctcctatactaagtctgtgaaggggcgcttcacagtctcccgcgataatgccaagaacaccttgtaccttcagatgaactccctcaagccggaggacacagctctgtattactgtgcacgcggaagaacctactggttttacgcgatggattactggggcaagggcacccaggtgaccgtctcatct

SEQ ID NO: 742 - DNA, 369 bp, Artificial Sequence
  Description of Artificial Sequence: Synthetic polynucleotide
gaggtccagttggtggaatctggaggcggactggtgcaggctggagacagtctgagattgtcttgtgccgcttctggccggatcagcaactacgcaatgggctggttccggcaggcacccggtaaagaaagggagttcgtcgctgtcatcaccaggagcggcggaagcacatactatgctgatagtgttaagggccgcttcaccatttccagagataacggcaaaaacacgattgatcttcagatgaacagactgaagcctgaagacacagcagtgtactattgtgccgtgaggcgcagtcaaaaactggtaacctttggcgctgagtatccttggtggggccagggaacattggtgactgtcagctcc

SEQ ID NO: 743 - DNA, 348 bp, Artificial Sequence
  Description of Artificial Sequence: Synthetic polynucleotide
gaggtgcagttggtggagagcggcggaggcttggttcaagctgggggctcactcaggctgtcttgcactacctctgggcgtacaggcacccattatgcgatgggttggtttaggcaagcgcccggcaaggaacgcgagttcgttagtctcatcctgtggaacggcgagtttacgacctataaagattctgttaagggccgcttcaccatctcccgtgagaaaggcgaaaacacggtctacttgcaaatgaactctctgaaacccgaggatactgcggtgtattactgctacctgagggtgtttgctaggcgctactggggccagggaacccaggtgaccgtgtccagt

SEQ ID NO: 744 - DNA, 369 bp, Artificial Sequence
  Description of Artificial Sequence: Synthetic polynucleotide
gaagtgcagctggtggaaagtggaggcggactggtgcagccagggggcagcctccgcctttcttgtgaggtgtccggctttaccttcagcaactactggatgtactggattcgccaagcccctgggaagggactggagtgggtgtcccacattaacaccaacggtggcaacacttattaccgccatagtgttaaaggtagattcactatcagcagggataacgctaagaataccctgtacttgcagatgaacggcctgaagtccgaggacaccgctgtgtattactgtgccaaggctaactccgatgtcgggttgggttattacggcatggattactggggtaagggaactcaggtcacagtgagttct

SEQ ID NO: 745 - DNA, 357 bp, Artificial Sequence
  Description of Artificial Sequence: Synthetic polynucleotide
gaggtgcagctggtggaaagtggcgggggctctgttcagcccggcggatctctgcgcctgagctgtgctgcaccagagtccatcttcaacaataacgctgtttactggtatcggcaatttccgggcaaagaaagggagtacgtgggcctcatcacgattggtgggcgcactggatacgccgactctgtcaagggccgctttactatcagtcgtgataacgccaacaatgttgcttttctccagatggataacctgaagccggaagatactgcggtatattactgtgccgctaggcctggatattggtccagttcctacgattattggggtcagggaacccaagtaacagtgtcctct

SEQ ID NO: 746 - DNA, 348 bp, Artificial Sequence
  Description of Artificial Sequence: Synthetic polynucleotide
gaagtgcagctggtggaaagcggcggtggcctcgtgcaggcgggcgggtccctgagactgtcatgcgtcttctctggccgcgccccggctagttatgcaatggcttggtttcgccaggccgtgggcaacgagagggagtttgtcgctgcgatcaactggtccggcaggcgcacttactatgccgactcagtgaagggccgcttcactatttccaaggacaatgcacagaacaccgcctatctccagatgaccaacttggaaccagaggatactgccacgtattactgtaatgcttacttgagcggaacatattactggggccagggcacccaggtgaccgtctctagc

SEQ ID NO: 747 - DNA, 366 bp, Artificial Sequence
  Description of Artificial Sequence: Synthetic polynucleotide
gaggtccagctggtcgagtctggcggtggcttggtccgcgctggggactcactgcgcctgagttgtgctgtgtccggcctggccagctcctctttctttatgacttggttccgccaagggcagggcaaggagcgggaatttgtggccactatcagttggactggccgtacatcctattacgctgccagcgtgaaaggccgctttaccgttagtcgggacaatgccaagaataccgtgtaccttcagatgaactctctgaactctgaggatacagcagtctacttctgtgcagcctacccgcgtacactggtgcgtaatcgcgagccgatccattggggtcagggaacccaggtgactgtgtcctcc

SEQ ID NO: 748 - DNA, 363 bp, Artificial Sequence
  Description of Artificial Sequence: Synthetic polynucleotide
caggtccagctccaggagagcgggggcggttctgtgcaagccggaggctcattgagactctcatgcgctgcaagtggttttaccttcgatgacagcgatatgggatggtatcgtcaggctccgggcaatgagtgtgatctggtctccactatctcctctgatggttccacatactatgctgactctgtcaaggggcgctttaccatctcccaagataatgccaagaacaccgtgtaccttcagatggattcagttaagcccgaggacacagccgtctattactgcgctgcggattttatgattgccatccaagctcccggagcgggatgctggggccagggaacccaggtcactgtgagcagt

SEQ ID NO: 749 - DNA, 351 bp, Artificial Sequence
  Description of Artificial Sequence: Synthetic polynucleotide
caggtgcagttgcaggagtccggcgggggttctgtgccagcgggtgggagcctcaagctctcctgtgccgcttccggcttctcattctcctcttaccctatgacctgggcacgccaagcgcccggcaagggactggaatgggtgtccaccattgcttccgatggcggtagtacagcctacgccgcgtcagtggagggtcggttcacgatcagccgggacaacgcgaagagcacactctacctccagctgaactctctgaagaccgaggacaccgccatgtactattgcacaaagggctacggcgacggcaccccggcacccggccagggcacccaggtgacagtctcttcc

SEQ ID NO: 750 - DNA, 363 bp, Artificial Sequence
  Description of Artificial Sequence: Synthetic polynucleotide
caggtgcagttgcaggaaagtggtggagggagtgtgcagactgggggctctctccgcctcagctgcacagcctctggatttaccttcgatgatcgcgagatgaactggtatcgccaggctccgggaaacgagtgcgaactggtgtctacaatcagttctgacgggtccacctattacgctgatagtgtcaagggccgcttcactatctctcaggacaacgcgaagaacaccgtttacttgcagatggatagcgtgaagcctgaagatacagcggtgtattactgcgctgccgactttatgattgccatccaggcaccgggggcggggtgttggggacagggaactcaggtgactgtgtcctcc

SEQ ID NO: 751 - DNA, 375 bp, Artificial Sequence
  Description of Artificial Sequence: Synthetic polynucleotide
caggttcaactccaagagagtggtggcggaagcgtgcaggcgggcggttctctgcgtctgagttgcactgccagcggatttaccttcgacgattccgacatgggatggtacagacaggcccctggtaacgagtgcgaactcgtgagtactatcagctccgacggcaacacctattacaccgattctgtgaagggcaggttcaccatctcccaggacaacgctaagaacactgtgtacctgcaaatgaatagcctgggacccgaggacacagcggtctattactgcgcggcagagccgcgcggctattacagcaactacggcggtagacgcgagtgcaactactgggggcaggggacgcaagtgactgtctcctcc

SEQ ID NO: 752 - DNA, 351 bp, Artificial Sequence
  Description of Artificial Sequence: Synthetic polynucleotide
caagtgcagcttcaggagtccgggggtggcagcgtccaggctgggggcagcttgcgcctgtcttgcgctgcgtctgggttcagctttagctcctaccctatgacctgggctagacaggcccccggcaaggggctggagtgggtgagtacaatcgcctccgacggaggtagtacggcctacgcagcgtccgtcgagggtcgcttcaccatcagccgggataacgctaagtccaccctgtaccttcagctcaattctctcaaaacggaggataccgccatgtactattgcaccaagggatatggcgacggcaccccagctcctggacagggcacacaggtcaccgttagctcc

SEQ ID NO: 753 - DNA, 360 bp, Artificial Sequence
  Description of Artificial Sequence: Synthetic polynucleotide
caggtccagcttcaggagtctggcgggggcgcagtacaggcagggggttctctgcgtctgtcctgcgccgcgtccggctttactttcagcaacgcacacatgagttgggtgcgccaagcgcccggcaagggccgggaatggatcagtagcatctacagtggaggcagcacatggtacgccgactctgttaagggtcgttttacgatctctcgtgacaactccaagaacactttgtacctccagctcaattctctcaagaccgaggacaccgcgatgtactattgtgccgagaacaggctgcactactattccgacgatgactctctcaggggccagggaactcaagttaccgtgtccagc

SEQ ID NO: 754 - DNA, 363 bp, Artificial Sequence
  Description of Artificial Sequence: Synthetic polynucleotide
caagtgcagctccaagagagtggtggcgggctggttcagccagggggcagcttgagactctcctgcgcagcttcaggctttaccttcgatgaccgtgagatgaactggtatcgtcaggccccaggcaacgagtgtgagctggttagcacgatttcttccgacggttccacctattacgccgactctgtgaagggacgtttcactatctcccaggacaatgccaagaacaccgtgtacctccagatggacagcgtgaagccggaggatactgctgtgtattactgcgctgccgactttatgatcgccatccaggcccctggcgcgggttgctggggccagggcactcaggtgaccgtgtcttcc

SEQ ID NO: 755 - DNA, 381 bp, Artificial Sequence
  Description of Artificial Sequence: Synthetic polynucleotide
caagtgcaactgcaagagtccggcggtggatctgtgcaggccggaggcagcctgcggctgagctgtgtagcttccgggtatacctttagctcatactgtatgggctggtttcgtcaggcccccggtaaggagcgcgagggcgtggccgctcttggtggaggctccacctattacgccgattccgtgaagggcaggtttactatctcccaggacaacgcgaagaatacgctctatctccagatgaatagcctgaagcccgaggatacagctatgtattactgtgctgccgcttgggtagcctgcctggagttcggtggctcctggtacgatctggcacggtacaaacattgggggcagggcacccaggtcaccgtgtctagc

SEQ ID NO: 756 - DNA, 372 bp, Artificial Sequence
  Description of Artificial Sequence: Synthetic polynucleotide
caggtccagttgcaggaatctgggggcggttccgtacaagcaggtggctcccttcggttgagctgtaccgcatccggctttactttcgacgatagcgatatgggctggtatcgtcaggccccagggggcgagtgcgagctggttacaatctcctctgacggcagtacctattacgcagactccgtcaagggcaggttcactatcagtcaggacaatgcaaagaacactgtgtatctccagatgaactctctgaagccagaagatactgccgtgtattactgcgctgcggaaccgagaggctattactctaattatggcgggcgtcgggagtgtaattattggggacagggaacccaggtgaccgtgtcctcc

SEQ ID NO: 757 - DNA, 381 bp, Artificial Sequence
  Description of Artificial Sequence: Synthetic polynucleotide
caggtgcagctccaggagagtggcggaggctccgtgcaggctgggggctctctgcgtctgagctgtgccgcaagcggtagcatttacagctctgcctacatcgggtggtttcgtcaagcgccgggcaaaaagcgcgaaggcgtggccggaatctacacgcgcgatggctccaccgcttatgctgacagcgttaagggacgttttacgatcagccaggactctgccaaaaagactgtgtatctccagatgaactccctgaaacctgaggacacagccatgtattactgcgccgctggccgccgtacaaagagctatgtttacatctttcgccccgaagagtacaactactggggccagggaacccaagtgactgtgtccagt

SEQ ID NO: 758 - DNA, 360 bp, Artificial Sequence
  Description of Artificial Sequence: Synthetic polynucleotide
caggttcagttgcaggagtccggcggaggcagcgtgcaggccggaggctccttgcgcttgtcctgtgcggcttctggcttcaccttctcatctgctcacatgagttgggtgcgtcaggccccagggaaaggtcgcgagtggattgcctccatctacagcggtgggggcactttttatgcggacagcgtgaagggccgctttaccatcagccgtgacaacgctaagaacaccctgtatctccaactcaattccctcaagaccgaggatacagcgatgtactattgtgcaaccaaccgccttcactattactccgacgatgacagcctgcgcggacaggggacccaggtgacggtgtccagc

SEQ ID NO: 759 - DNA, 360 bp, Artificial Sequence
  Description of Artificial Sequence: Synthetic polynucleotide
caggtgcaactccaggaaagtggcggaggctcagtgcaggcaggtggctctctccgcctttcctgcgctgccagcggattcaccttctctaacgctcacatgagctgggttcgtcaggctcccggcaaaggccgtgaatggattagctccatctatagtggcggaagtacttggtacgcagatagcgtcaagggccgcttcactattagtcgggataactccaagaacactctgtacctccagctgaactcattgaaaaccgaggacacggctatgtactattgtgctgagaacaggctgcactattactccgacgatgactctctgaggggtcagggcacccaggtgaccgtcagctcc

SEQ ID NO: 760 - DNA, 375 bp, Artificial Sequence
  Description of Artificial Sequence: Synthetic polynucleotide
caggtccaactccaggagtccggcggaggcagcgtgcaggctggaggctctctccgcctgagctgcacagcttccagattcatcttcgatgactccgacatgggctggtatcgccaggctccagggaacgagtgcgaactggtgagcaccatctcttcagacggtagcacctattacgccgacagtgtgaaggggcgcttcaccatctcccgcgacaatgctaaaaatacggtgtatctccagatgaactccctcaaaccggaggacacagctgtatattactgtgctgcggaaccacggggctactatagcaactatggtggaaggcgcgagtgcaactactggggtcagggcacacaggtgacggtttcctcc

SEQ ID NO: 761 - DNA, 372 bp, Artificial Sequence
  Description of Artificial Sequence: Synthetic polynucleotide
caggtgcagctccaggagagcggcggtggctccgtgcaggctggtggcagcctgaagctgtcctgcaccgtgagtggcttcacagccgacgattctgatatgggctggtatcgccaaggccccggcaatgagtgcgagctggtaaccattagctcagacggctctacatactatgccgattctgttaagggccgctttactatctcacaggataatgccaagaacacagtgtacttgcagatgaactctctgaaaccggaagacacagctgtgtattactgtgctgcggagcctagagggtattacagcaattacgggggccggagagagtgtaactattgggggcagggcacccaagtgaccgtttcctcc

SEQ ID NO: 762 - DNA, 360 bp, Artificial Sequence
  Description of Artificial Sequence: Synthetic polynucleotide
caggtccagcttcaggaatctgggggcggtctcgtgcagcccggcgggtccctgcgtctgtcttgtgctgcgagcggcttcacgttctcaagtgcccacatgagctgggtaaggcaggcaccgggcaaggggcgcgagtggattgcaagcatctattcaggcgggggcacattctacgccgacagcgtgaagggacgttttacaatctccagagataacgcaaagaacactctctacctccaactcaactccttgaaggcggaagatactgcaatgtattactgtgctactaaccgtcttcattattactctgacgatgactccctgcgggggcagggtacacaggtgacagtgagttcc

SEQ ID NO: 763 - DNA, 360 bp, Artificial Sequence
  Description of Artificial Sequence: Synthetic polynucleotide
caggtgcagctgcaagaatctggtggagggctggtccagcctgggggctccctgcgcctctcatgtgtcgcatctggcttcaccttcagcaacgcccacatgagctgggttcgccaagcccctgggaagggccgggagtggatctccagtatctattccggcggaagcacttggtatgcagacagcgtcaaaggacggttcactatttctcgtgataattctaagaacaccctgtaccttcagctgaacagcctgaagaccgaggacactgctatgtactattgtgctgagaatcgcctgcattactatagcgacgatgacagtctgcgcggacaggggacccaggtcaccgtgtcctct

SEQ ID NO: 764 - DNA, 360 bp, Artificial Sequence
  Description of Artificial Sequence: Synthetic polynucleotide
caggttcagttgcaggaatcaggaggcggtctggtgcagcctgggggctctctgcgtctctcctgcgccgcttccggcttcacattctccaacgcccacatgagctgggtccgccaggcccctgggaagggccgcgagtggatctccagtatctacagcgggggctccacttggtacgcagacagcgtcaaagggaggtttaccattagccgtgacaattctaagaacacattgtatttgcagctgaactctcttaaaaccgaggacaccgccatgtactattgtgctgagaacaggctccactattactcagacgatgactcacttcgcgggcagggaacccaggtcaccgtctcctct

SEQ ID NO: 765 - DNA, 351 bp, Artificial Sequence
  Description of Artificial Sequence: Synthetic polynucleotide
caagtccagctccaggaaagcggcggtggcctggtgcaacctggcgggtctctgcgcttgtcatgcgctgcctccggcttcaccttctcatcttaccctatgacctgggcgcgtcaggctcccggcaagggattggagtgggtgtctactattgcctccgacggtggcagcacggcctacgcagcgtctgtagaaggacgcttcacaattagcagagacaacgcaaaatctactttgtaccttcagctcaacagcctgaagaccgaagacacagctatgtattactgcacaaaaggctacggggacggcacgccagcgcctggacaggggacacaggtgaccgtatcttct

SEQ ID NO: 766 - DNA, 363 bp, Artificial Sequence
  Description of Artificial Sequence: Synthetic polynucleotide
caggtgcagttgcaggaatcagggggtggctctgtgcaggccgggggctccctgcgtctgtcctgtactgcgagcggcttcacctttgatgaccgcgagatgaactggtatcgccaggctccggggaacgagtgcgaactcgtgtctacaattagctccgatggttcaacatactatgctgattctgtcaaaggtcgctttaccatctcacaggacaacgccaagaacaccgtctacctccagatggactctgtgaagcctgaagataccgccgtatactattgcgccgctgactttatgattgccattcaggctccgggtgctggatgctggggtcaggggactcaggtgaccgtgtcttca

SEQ ID NO: 767 - DNA, 375 bp, Artificial Sequence
  Description of Artificial Sequence: Synthetic polynucleotide
caagtgcagttgcaggaaagcggcggtgggtccgtgcaagccggaggttctctccgcctgtcttgcactgcctcaggttttaccttcgacgattccgatatgggctggtacaggcaggctcccggcaatgagtgcgagctggtgtctacgatctcaagtgatggctccacctactatgccgatagcgtaaaaggaaggtttactattagccaggataacgcgaagaacacggtgtacctccagatgaacagtctcaagccggaggatactgccgtgtattactgtgctgccgagccgcgtggctattactccaactacggtggcagacgtgaatgcaattactggggacagggtactcaggttaccgtgtcctct

SEQ ID NO: 768 - DNA, 357 bp, Artificial Sequence
  Description of Artificial Sequence: Synthetic polynucleotide
caggttcaacttcaggaatccgggggcggttccgtgcaagccgggggtagcctgcgtctgtcttgcgtggccagcggctatacctcctgtatgggttggtttcggcaggctcctgggaaggagcgcgaagccgtggcgaccatctacacacggggccgcagcatctattacgctgacagtgtgaagggccgcttcaccatctcccaggataacgccaagaataccctgtatctgcaaatgaactccctgaagcctgaggacatcgccatgtattcctgcgcagctggagggtactcatggtccgctgggtgcgagtttaattattggggccaaggaacccaggtgaccgtctcctca

SEQ ID NO: 769 - DNA, 351 bp, Artificial Sequence
  Description of Artificial Sequence: Synthetic polynucleotide
caagtgcagctccaggagtctggcgggggcctggttcagcctggtgggtccctgcgcctgtcttgcacggcttccggctttagcttctcctcatatccaatgacctgggcacgccaggctcctggtaagggcctggagtgggtctccaccatcgcctctgatggtgggtcaactgcctatgctgcctccgtcgagggtagattcacaatcagcagagacaacgccaaatccacgctgtacctgcaactcaactccttgaagaccgaggacacagctatgtattactgtaccaaaggctacggcgacggcactcctgctcccggacaggggacccaggtgactgtgtctagc

SEQ ID NO: 770 - DNA, 351 bp, Artificial Sequence
  Description of Artificial Sequence: Synthetic polynucleotide
caggtccaacttcaggaaagcgggggtggactggtacagccagggggcagtctgcgcctgtcctgtgccgcaagcgggttttctttctccagttaccccatgacctgggctcgccaagcacctggaaagggactggagtgggtgtctactattgcgtcagatggtgggagtacggcttacgccgcgagcgtggagggtcgttttacgatcagtagggacaacgccaaaagcactctgtacctccagcttaacagcctgaagaccgaggacaccgccatgtattactgtaccaagggctacggagacggcacccctgcgccggggcaaggcacccaggtgaccgtaagttca

SEQ ID NO: 771 - DNA, 381 bp, Artificial Sequence
  Description of Artificial Sequence: Synthetic polynucleotide
caggtgcaactccaggagtccggcgggggctccgtgctggctggcggatctttgaggctgtcttgcgtggcttctggctatggctataattacatcggctggttccgtcagacacccggcaaggagcgcgaaggggtggcggtcatttacacagggggtggggacacttattacgccgactccgtcaagggtaggtttaccgctagtcgcgataatgccaaaagtacgctgtacctgcaaatgaacagcttggagccagaggacaccgccatgtattacggagtggctcgctactgtgtgggcagtgtgtacgcttgcctgcgcggaggccacgacgagtacgcacactggggccagggaacccaggtgacagtgtctagc

SEQ ID NO: 772 - DNA, 402 bp, Artificial Sequence
  Description of Artificial Sequence: Synthetic polynucleotide
caggtgcagctccaggagtctgggggtggcagcgtccagccaggtggctcattgagactgtcttgtgctgcatctggctccacctacgctaattacctgatgggatggttcaggcaggcccctggtaaggagcgtgagggcgtggccgctatctattctggcggtgggtccacctactatgctgactccgtcaagggacgcttcactatttctcaagacaatgccaagaacactttgtacttgcaaatgaactcactcaaacctgaggacaccgcgatgtactattgcgcagcggcatccgcagtgaagggagacaaaggggatatcgtggtagttgtgaccggcacccagcgtatggagtacgactactggggacatggcacccaggtgacagttagctcc

SEQ ID NO: 773 - DNA, 396 bp, Artificial Sequence
  Description of Artificial Sequence: Synthetic polynucleotide
caggtacagttgcaggagagtggtgggggttccgtccaggccggtgcctctcttcgcctcagttgtagcgtgagcggtttcacgttcgacgagtcagtgatgtcctggttgcgccagggtcccggcaatgagtgcgacgcggtcgctattatcagctccgatgacaacacctattacgacgatagcgtgaaaggccgctttaccatctccgaggacaacgccaaaaacatggtgtatctgcaaatgaactcactgaagccggaagacaccgcagtgtactattgcgccgcgcgtcggcgcagacctgtgtacgattccgattatgaactccggccacgtccgctgtgtggcgatttcggcgtgtggggccaggggacccaggtgacggtctcctcc

SEQ ID NO: 774 - DNA, 387 bp, Artificial Sequence
  Description of Artificial Sequence: Synthetic polynucleotide
caggtgcagctccaggaatctggcgggggctctgtgcaggctggtggctcccttcgcctgtcctgtattggctccggtcttcctttcgacgaggatgacatgggctggtatcgccaggcccctgggaatgagtgtgaattggtcagctcaatctccagtgacggcaccgcctattacgccgattccgtcaagggacgcttcactatctccagagacaacgccaagaacactgtgctgttgcagatgaactccctgaagcccgaggataccgctgtctattactgcgcagccggggtccacagacagttcggcggttccagttcctgcggcgacgccttctacggcatggattactggggcaagggaactcaggtcacagtgtcttcc

SEQ ID NO: 775 - DNA, 372 bp, Artificial Sequence
  Description of Artificial Sequence: Synthetic polynucleotide
caggttcagcttcaggagtccggcgggggctccgtacaggcagggggctcactgcgtctttcctgtgtggcgagtggcgacgtgtatggccgtaacagcatggcttggttccggcaggcacctggaaaggaacgcgagggcgttgcagttgggtattccgtagtgacaaccacttactatgccgacagtgtgaagggccggtttacgatctcagaggacaacgataaaaacacagtgtacctggagatgaactccctgaagccggaagacactgctatgtattactgcgctgccgatggcaacctgtggcgcggactcaggccctccgagtacacttattggggtcagggcacccaggtgaccgtttcaagt

SEQ ID NO: 776 - DNA, 384 bp, Artificial Sequence
  Description of Artificial Sequence: Synthetic polynucleotide
caggtccagcttcaggagtcaggtggcggtagtgtccaggcaggcggtagcctgcgccttagctgtgctacatccggcttcccttactcacgctattgtatgggctggttcaggcaagctcccggtaaagagcgcgagggagtggcagccatcgagcctgacgggagcacatcttatgctgactctgtaaaggggcgtttcaccatctctcaggacaacgccgttaatacactgtacttgcaaatgaataacctgaagcccgaggacacagctatgtattactgcgcagccgacgagcgttgcttctatttgaaggactatgacctcagaaggccagcccagtaccgctactgggggcagggcacccaggttaccgtgtcatct

SEQ ID NO: 777 - DNA, 396 bp, Artificial Sequence
  Description of Artificial Sequence: Synthetic polynucleotide
caggtgcagttgcaggagagtggcggtggcctcgtgcagcctggcggaagcctccgtctgagctgcactgtgtccggcttcactttcgacgagagcgacatgggctggctgaggcagaaccctggtaacgagtgcggcgttgtgagtgtcatcacgtctgatgacaacccatactatgatgacagcgtcaagggccgctttactatctccgaggataacgccaagaacatggtgtacctccagatgaactcactgaagcccgaggataccggcgtttattactgtgcaaccaggagccgtcagcctgtgtactcacgcgattacgagctgcggccccgccccctctgtggagactttggtgtgtggggccagggcacccaggtgactgtttccagc

SEQ ID NO: 778 - DNA, 378 bp, Artificial Sequence
  Description of Artificial Sequence: Synthetic polynucleotide
caggtgcagttgcaggagagtggagggggctcagtgcaggctggcgggtccttgcgtctgtcttgcaccgcctctggcttcaccttcgatgacttcgatatgggttggtatcgccaggctccagggaacgagtgcgaattggtcagcactatcagcgacgatggctcaacatattacgccgactctgtgaagggacggtctagcattagccgggacaacgcaaagaacaccgtctatctccagatgaaccgcttgaagcctgaggataccggagtctattactgcgccgctgagggcgcgttgggctccaagactaattgtggctgggtgggcaacttcggatattggggccagggaacacaggttaccgtttccagc

SEQ ID NO: 779 - DNA, 378 bp, Artificial Sequence
  Description of Artificial Sequence: Synthetic polynucleotide
caggtgcagttgcaggagtctggaggcggttccgttcaggccgggggctctctgcgcctgtcctgcgctgcctccgggtttacatttgacgatttcgatatgggctggtatcgccaggcccctggcaacgagtgcgaactggtgtctactatctccgatgacggctcaacctactatgcagactccgtaaagggcagatccagcatctcccgcgacaatgccaaaaacactgtgtacctccagatgaactccctcaagcctgaggatacggcggtgtactattgtgctgccgagggtgcgctcggtagcaagactaattgcggctgggtgggcaacttcgggtactggggtcaggggacccaggtaaccgtgtcttct

SEQ ID NO: 780 - DNA, 378 bp, Artificial Sequence
  Description of Artificial Sequence: Synthetic polynucleotide
caggtgcagttgcaggaaagcggtgggggcctggtgcagcccggaggcagcctgcgcttgagctgcgctgcctctggcttcacattcgatgacttcgatatgggctggtatcgtcaagcacccggaaacgagtgcgagctggtgagtacaatcagtgatgacggatctacctactatgccgacagcgtcaagggaagatccagcatcagtcgcgacaacgccaagagcaccgtttacctccagatgaaccgcctcaagcctgaggacacaggagtctattactgtgctgcggagggggccttgggcagcaagactaactgtggatgggtgggaaacttcgggtattggggtcagggtacacaggtcacagtgtcttca

SEQ ID NO: 781 - DNA, 378 bp, Artificial Sequence
  Description of Artificial Sequence: Synthetic polynucleotide
caagttcagcttcaggaaagtgggggcgggctggtgcagccagggggttccctgaagctgagctgcgctgcctctgggtttacattctctgatcgcgacatgggctggtatcgccaagcgccgggcaatgaatgcgaaagagtgagtactatttctgacgatggttctacttactatgctgactccgtgaagggccgtagctccatttccagggacaacgcgaagaacaccgtatacctccagatgaactctctgaagcccgaggacaccgctgtgtattactgcgctgccgagggggctctcggctcaaagaccaactgcggatgggtcggtaacttcggctactggggccagggcacccaagtgacagtctcctcc

SEQ ID NO: 782 - DNA, 381 bp, Artificial Sequence
  Description of Artificial Sequence: Synthetic polynucleotide
caggtccagttgcaggagagcgggggtggaagcgtcctcgccggagggagcctccgtttgagctgcgtcgcctcaggctacggctacaattacatcggatggttcagacagacgcctggtaaagagcgggaaggcgtcgccgtgatttatatcggtggcggagacacctattacgctgactcagtgaaggggcgtttcaccgcaagccgggacaacgctaagagcaccctgtacctccagatgaactctctcgaacctgaggacactgcaatgtattactgcgtggctcgttactgcgtcgggagtgtctacgcctgcctgaggggcgggcatgatgagtatgcccactggggacaaggaacacaggtgactgtctccagt

SEQ ID NO: 783 - DNA, 381 bp, Artificial Sequence
  Description of Artificial Sequence: Synthetic polynucleotide
caggttcagctccaggagtctggtggcggttccgtgctggccgggggctctctgcgcctgtcttgtgtcgcctcagggtacggctataactacattggctggttcagacagacccctgggaaagagcgggagggtgtggctgtcatttacaccggcggaggcgacacctactatgccgattcagttaagggcaggtttaccgcgagccgtgacaacgcgaagtctactctgtacctgcaaatgaacagcctggaacctgaggatactgcgatgtactattgtgtggcccggtactgcgtaggctcagtgtatgcctgcctgcgcgggggtcacgacgagtacgcacactggggacagggaactcaggtcaccgtgtctagc

SEQ ID NO: 784 - DNA, 378 bp, Artificial Sequence
  Description of Artificial Sequence: Synthetic polynucleotide
caggtgcaactccaggagtccggcgggggctccgtccaagctggtggctcactgaggcttagctgtgctgcctccggctttactttcgacgatttcgacatgggttggtatcgccaggctccgggcaatgagtgcgagctggtctctaccatttccgatgacggctctacctactatgccaacagtgttaagggtaggtcttccatctcccgcgacaacgctaagaatatggtgtacttgcagatgaactctctgaagcctgaggacactgctgtctactattgcgctgccgaaggtgccctgggctcaaagactaattgcggctgggtcggtaactttggctactggggtcaggggactcaggtgaccgtcagctcc

SEQ ID NO: 785 - DNA, 378 bp, Artificial Sequence
  Description of Artificial Sequence: Synthetic polynucleotide
caggtccagttgcaggaaagcggcgggggctctgttcaggcaggcggaagccttcgtctgtcctgtactgccagtggtttcacctttgatgactttgacatgggctggtatcggcaagcccccggaaacgagtgcgagctggtatccaccatttccgatgacgggtccacgtactatgctgatagcgtgaagggcaggtcttccatcagccgggacaacgccaagaacacagtgtatttgcagatgaaccgcctcaagccagaagacaccggggtatattactgtgcagcggaaggtgccctgggtagcaagatgaactgcggatgggtgggtaattttggatactggggccagggcacgcaggttacagtgtccagc

SEQ ID NO: 786 - DNA, 771 bp, Artificial Sequence
  Description of Artificial Sequence: Synthetic polynucleotide
gaggtgcagctgcaggagtctgggggaggcttggtgcagcctggggggtctctgagactctcctgtgcagcctctggattcaccttcagtctgtatgacatgagctgggtccgccaggctccaggaaagggacttgagtgggtctcgggtattaatagtggtggttatagcacatattatgcagcctccgcgaagggccgattcaccatctccagagacaacgccaagaacaccctgtatctgcaattgagcagcgtgaagactgaggacacggccatgtattactgtgcgcaaagagggttgactagcccctatgttataccgaatatacgcctgcaggggacccaggtcaccgtctcgagtggaggaggatcccaggttcagctgcaagaatctggcggcggatctgttcaggctggcggatctctgagactgtcctgtgtggcttctggcgacgtgtacggcagaaactccatggcctggttcagacaggcccctggcaaagaacgagaaggcgtggccgtgggctattccgtggtcaccaccacctactacgccgactctgtgaagggcagattcaccatctccgaggacaacgacaagaacaccgtgtacctggaaatgaactccctgaagcctgaggacaccgccatgtactactgtgccgccgatggcaacctttggagaggcctcagaccttccgagtacacctattggggccagggcacccaagtgaccgtctctagtgctagccaccatcaccatcaccac

SEQ ID NO: 787 - protein, 257 aa, Artificial Sequence
  Description of Artificial Sequence: Synthetic polypeptide
EVQLQESGGGLVQPGGSLRLSCAASGFTFSLYDMSWVRQAPGKGLEWVSGINSGGYSTYYAASAKGRFTISRDNAKNTLYLQLSSVKTEDTAMYYCAQRGLTSPYVIPNIRLQGTQVTVSSGGGSQVQLQESGGGSVQAGGSLRLSCVASGDVYGRNSMAWFRQAPGKEREGVAVGYSVVTTTYYADSVKGRFTISEDNDKNTVYLEMNSLKPEDTAMYYCAADGNLWRGLRPSEYTYWGQGTQVTVSSASHHHHHH

SEQ ID NO: 788 - DNA, 783 bp, Artificial Sequence
  Description of Artificial Sequence: Synthetic polynucleotide
gaggtgcagctgcaggagtctgggggaggcttggtgcagcctggggggtctctgagactctcctgtgcagcctctggattcaccttcagtctgtatgacatgagctgggtccgccaggctccaggaaagggacttgagtgggtctcgggtattaatagtggtggttatagcacatattatgcagcctccgcgaagggccgattcaccatctccagagacaacgccaagaacaccctgtatctgcaattgagcagcgtgaagactgaggacacggccatgtattactgtgcgcaaagagggttgactagcccctatgttataccgaatatacgcctgcaggggacccaggtcaccgtctcgagtggaggaggatcccaggttcagctgcaagaatctggcggcggatctgttcaggctggcggatctctgagactgtcctgtgccacctctggcttcccttacagcagatactgcatgggctggttcagacaggcccctggcaaagagagagaaggcgttgccgctatcgagcctgacggctctacctcttacgccgactctgtgaagggcagattcaccatcagccaggacaacgccgtgaacaccctgtacctgcagatgaacaacctgaagcctgaggacaccgccatgtactactgtgccgccgacgagagatgcttctacctgaaggactacgacctgcggaggcccgctcagtacagatattggggccagggcacccaagtgaccgtctctagtgctagccaccatcaccatcaccac

SEQ ID NO: 789 - protein, 261 aa, Artificial Sequence
  Description of Artificial Sequence: Synthetic polypeptide
EVQLQESGGGLVQPGGSLRLSCAASGFTFSLYDMSWVRQAPGKGLEWVSGINSGGYSTYYAASAKGRFTISRDNAKNTLYLQLSSVKTEDTAMYYCAQRGLTSPYVIPNIRLQGTQVTVSSGGGSQVQLQESGGGSVQAGGSLRLSCATSGFPYSRYCMGWFRQAPGKEREGVAAIEPDGSTSYADSVKGRFTISQDNAVNTLYLQMNNLKPEDTAMYYCAADERCFYLKDYDLRRPAQYRYWGQGTQVTVSSASHHHHHH

SEQ ID NO: 790 - DNA, 777 bp, Artificial Sequence
  Description of Artificial Sequence: Synthetic polynucleotide
gaggtgcagctgcaggagtctgggggaggcttggtgcagcctggggggtctctgagactctcctgtgcagcctctggattcaccttcagtctgtatgacatgagctgggtccgccaggctccaggaaagggacttgagtgggtctcgggtattaatagtggtggttatagcacatattatgcagcctccgcgaagggccgattcaccatctccagagacaacgccaagaacaccctgtatctgcaattgagcagcgtgaagactgaggacacggccatgtattactgtgcgcaaagagggttgactagcccctatgttataccgaatatacgcctgcaggggacccaggtcaccgtctcgagtggaggaggatcccaggttcagctgcaagaatctggcggcggatctgttcaggctggcggatctctgagactgtcctgtaccgcctctggcttcaccttcgacgacttcgacatgggctggtacagacaggcccctggcaacgagtgtgaactggtgtccaccatctccgacgacggctctacctactacgccgactctgtgaagggcagatcctccatcagccgggacaacgccaagaacaccgtgtacctgcagatgaaccggctgaagcctgaggacaccggcgtgtactattgtgctgctgaaggcgccctgggctccaagaccaattgtggctgggtcggaaacttcggctattggggccagggcacccaagtgacagtctctagtgctagccaccatcaccatcaccac

SEQ ID NO: 791 - protein, 259 aa, Artificial Sequence
  Description of Artificial Sequence: Synthetic polypeptide
EVQLQESGGGLVQPGGSLRLSCAASGFTFSLYDMSWVRQAPGKGLEWVSGINSGGYSTYYAASAKGRFTISRDNAKNTLYLQLSSVKTEDTAMYYCAQRGLTSPYVIPNIRLQGTQVTVSSGGGSQVQLQESGGGSVQAGGSLRLSCTASGFTFDDFDMGWYRQAPGNECELVSTISDDGSTYYADSVKGRSSISRDNAKNTVYLQMNRLKPEDTGVYYCAAEGALGSKTNCGWVGNFGYWGQGTQVTVSSASHHHHHH

SEQ ID NO: 792 - protein, 230 aa, Artificial Sequence
  Description of Artificial Sequence: Synthetic polypeptide
RVESKYGPPCPPCPAPEFLGGPSVFLFPPKPKDTLMISRTPEVTCVVVDVSQEDPEVQFNWYVDGVEVHNAKTKPREEQFGSTYRVVSVLTVLHQDWLNGKEYKCKVSNKGLPSSIEKTISKAKGQPREPQVYTLPPSQEEMTKNQVSLTCLVKGFYPSDIAVEWESNGQPENNYKTTPPVLDSDGSFFLYSRLTVDKSRWQEGNVFSCSVMHEALHNHYTQKSLSLSLG

SEQ ID NO: 793 - protein, 231 aa, Homo sapiens
RVESKYGPPCPSCPAPEFLGGPSVFLFPPKPKDTLMISRTPEVTCVVVDVSQEDPEVQFNWYVDGVEVHNAKTKPREEQFNSTYRVVSVLTVLHQDWLNGKEYKCKVSNKGLPSSIEKTISKAKGQPREPQVYTLPPSQEEMTKNQVSLTCLVKGFYPSDIAVEWESNGQPENNYKTTPPVLDSDGSFFLYSRLTVDKSRWQEGNVFSCSVMHEALHNHYTQKSLSLSLGK

SEQ ID NO: 794 - protein, 5 aa, Homo sapiens
EPKSC

SEQ ID NO: 795 - protein, 5 aa, Artificial Sequence
  Description of Artificial Sequence: Synthetic peptide
EPKSS

SEQ ID NO: 796 - protein, 10 aa, Homo sapiens
DKTHTCPPCP

SEQ ID NO: 797 - protein, 227 aa, Homo sapiens
DKTHTCPPCPAPELLGGPSVFLFPPKPKDTLMISRTPEVTCVVVDVSHEDPEVKFNWYVDGVEVHNAKTKPREEQYNSTYRVVSVLTVLHQDWLNGKEYKCKVSNKALPAPIEKTISKAKGQPREPQVYTLPPSRDELTKNQVSLTCLVKGFYPSDIAVEWESNGQPENNYKTTPPVLDSDGSFFLYSKLTVDKSRWQQGNVFSCSVMHEALHNHYTQKSLSLSPGK

SEQ ID NO: 798 - protein, 800 aa, Artificial Sequence
  Description of Artificial Sequence: Synthetic polypeptide
  SITE (1)..(20): This region may encompass 1-20 residues
  SITE (21)..(40): This region may encompass 1-20 residues
  SITE (41)..(60): This region may encompass 1-20 residues
  SITE (61)..(80): This region may encompass 1-20 residues
  SITE (81)..(100): This region may encompass 1-20 residues
  SITE (101)..(120): This region may encompass 1-20 residues
  SITE (121)..(140): This region may encompass 1-20 residues
  SITE (141)..(160): This region may encompass 1-20 residues
  SITE (161)..(180): This region may encompass 1-20 residues
  SITE (181)..(200): This region may encompass 1-20 residues
  SITE (201)..(220): This region may encompass 1-20 residues
  SITE (221)..(240): This region may encompass 1-20 residues
  SITE (241)..(260): This region may encompass 1-20 residues
  SITE (261)..(280): This region may encompass 1-20 residues
  SITE (281)..(300): This region may encompass 1-20 residues
  SITE (301)..(320): This region may encompass 1-20 residues
  SITE (321)..(340): This region may encompass 1-20 residues
  SITE (341)..(360): This region may encompass 1-20 residues
  SITE (361)..(380): This region may encompass 1-20 residues
  SITE (381)..(400): This region may encompass 1-20 residues
  SITE (401)..(420): This region may encompass 1-20 residues
  SITE (421)..(440): This region may encompass 1-20 residues
  SITE (441)..(460): This region may encompass 1-20 residues
  SITE (461)..(480): This region may encompass 1-20 residues
  SITE (481)..(500): This region may encompass 1-20 residues
  SITE (501)..(520): This region may encompass 1-20 residues
  SITE (521)..(540): This region may encompass 1-20 residues
  SITE (541)..(560): This region may encompass 1-20 residues
  SITE (561)..(580): This region may encompass 1-20 residues
  SITE (581)..(600): This region may encompass 1-20 residues
  SITE (601)..(620): This region may encompass 1-20 residues
  SITE (621)..(640): This region may encompass 1-20 residues
  SITE (641)..(660): This region may encompass 1-20 residues
  SITE (661)..(680): This region may encompass 1-20 residues
  SITE (681)..(700): This region may encompass 1-20 residues
  SITE (701)..(720): This region may encompass 1-20 residues
  SITE (721)..(740): This region may encompass 1-20 residues
  SITE (741)..(760): This region may encompass 1-20 residues
  SITE (761)..(780): This region may encompass 1-20 residues
  SITE (781)..(800): This region may encompass 1-20 residues
  SITE (1)..(800): This sequence may encompass 1-20 "(Gly)m(Ser)o" repeating units, wherein m = 1 to 20, o = 1 to 20
  See specification as filed for detailed description of substitutions and preferred embodiments
GGGGGGGGGGGGGGGGGGGGSSSSSSSSSSSSSSSSSSSSGGGGGGGGGGGGGGGGGGGGSSSSSSSSSSSSSSSSSSSSGGGGGGGGGGGGGGGGGGGGSSSSSSSSSSSSSSSSSSSSGGGGGGGGGGGGGGGGGGGGSSSSSSSSSSSSSSSSSSSSGGGGGGGGGGGGGGGGGGGGSSSSSSSSSSSSSSSSSSSSGGGGGGGGGGGGGGGGGGGGSSSSSSSSSSSSSSSSSSSSGGGGGGGGGGGGGGGGGGGGSSSSSSSSSSSSSSSSSSSSGGGGGGGGGGGGGGGGGGGGSSSSSSSSSSSSSSSSSSSSGGGGGGGGGGGGGGGGGGGGSSSSSSSSSSSSSSSSSSSSGGGGGGGGGGGGGGGGGGGGSSSSSSSSSSSSSSSSSSSSGGGGGGGGGGGGGGGGGGGGSSSSSSSSSSSSSSSSSSSSGGGGGGGGGGGGGGGGGGGGSSSSSSSSSSSSSSSSSSSSGGGGGGGGGGGGGGGGGGGGSSSSSSSSSSSSSSSSSSSSGGGGGGGGGGGGGGGGGGGGSSSSSSSSSSSSSSSSSSSSGGGGGGGGGGGGGGGGGGGGSSSSSSSSSSSSSSSSSSSSGGGGGGGGGGGGGGGGGGGGSSSSSSSSSSSSSSSSSSSSGGGGGGGGGGGGGGGGGGGGSSSSSSSSSSSSSSSSSSSSGGGGGGGGGGGGGGGGGGGGSSSSSSSSSSSSSSSSSSSSGGGGGGGGGGGGGGGGGGGGSSSSSSSSSSSSSSSSSSSSGGGGGGGGGGGGGGGGGGGGSSSSSSSSSSSSSSSSSSSS

SEQ ID NO: 799 - protein, 100 aa, Artificial Sequence
  Description of Artificial Sequence: Synthetic polypeptide
  SITE (1)..(100): This sequence may encompass 1-20 "Gly Ser Gly Gly Ser" repeating units
  See specification as filed for detailed description of substitutions and preferred embodiments
GSGGSGSGGSGSGGSGSGGSGSGGSGSGGSGSGGSGSGGSGSGGSGSGGSGSGGSGSGGSGSGGSGSGGSGSGGSGSGGSGSGGSGSGGSGSGGSGSGGS

SEQ ID NO: 800 - protein, 1200 aa, Artificial Sequence
  Description of Artificial Sequence: Synthetic polypeptide
  SITE (1)..(20): This region may encompass 1-20 residues
  SITE (21)..(40): This region may encompass 1-20 residues
  SITE (41)..(60): This region may encompass 1-20 residues
  SITE (61)..(80): This region may encompass 1-20 residues
  SITE (81)..(100): This region may encompass 1-20 residues
  SITE (101)..(120): This region may encompass 1-20 residues
  SITE (121)..(140): This region may encompass 1-20 residues
  SITE (141)..(160): This region may encompass 1-20 residues
  SITE (161)..(180): This region may encompass 1-20 residues
  SITE (181)..(200): This region may encompass 1-20 residues
  SITE (201)..(220): This region may encompass 1-20 residues
  SITE (221)..(240): This region may encompass 1-20 residues
  SITE (241)..(260): This region may encompass 1-20 residues
  SITE (261)..(280): This region may encompass 1-20 residues
  SITE (281)..(300): This region may encompass 1-20 residues
  SITE (301)..(320): This region may encompass 1-20 residues
  SITE (321)..(340): This region may encompass 1-20 residues
  SITE (341)..(360): This region may encompass 1-20 residues
  SITE (361)..(380): This region may encompass 1-20 residues
  SITE (381)..(400): This region may encompass 1-20 residues
  SITE (401)..(420): This region may encompass 1-20 residues
  SITE (421)..(440): This region may encompass 1-20 residues
  SITE (441)..(460): This region may encompass 1-20 residues
  SITE (461)..(480): This region may encompass 1-20 residues
  SITE (481)..(500): This region may encompass 1-20 residues
  SITE (501)..(520): This region may encompass 1-20 residues
  SITE (521)..(540): This region may encompass 1-20 residues
  SITE (541)..(560): This region may encompass 1-20 residues
  SITE (561)..(580): This region may encompass 1-20 residues
  SITE (581)..(600): This region may encompass 1-20 residues
  SITE (601)..(620): This region may encompass 1-20 residues
  SITE (621)..(640): This region may encompass 1-20 residues
  SITE (641)..(660): This region may encompass 1-20 residues
  SITE (661)..(680): This region may encompass 1-20 residues
  SITE (681)..(700): This region may encompass 1-20 residues
  SITE (701)..(720): This region may encompass 1-20 residues
  SITE (721)..(740): This region may encompass 1-20 residues
  SITE (741)..(760): This region may encompass 1-20 residues
  SITE (761)..(780): This region may encompass 1-20 residues
  SITE (781)..(800): This region may encompass 1-20 residues
  SITE (801)..(820): This region may encompass 1-20 residues
  SITE (821)..(840): This region may encompass 1-20 residues
  SITE (841)..(860): This region may encompass 1-20 residues
  SITE (861)..(880): This region may encompass 1-20 residues
  SITE (881)..(900): This region may encompass 1-20 residues
  SITE (901)..(920): This region may encompass 1-20 residues
  SITE (921)..(940): This region may encompass 1-20 residues
  SITE (941)..(960): This region may encompass 1-20 residues
  SITE (961)..(980): This region may encompass 1-20 residues
  SITE (981)..(1000): This region may encompass 1-20 residues
  SITE (1001)..(1020): This region may encompass 1-20 residues
  SITE (1021)..(1040): This region may encompass 1-20 residues
  SITE (1041)..(1060): This region may encompass 1-20 residues
  SITE (1061)..(1080): This region may encompass 1-20 residues
  SITE (1081)..(1100): This region may encompass 1-20 residues
  SITE (1101)..(1120): This region may encompass 1-20 residues
  SITE (1121)..(1140): This region may encompass 1-20 residues
  SITE (1141)..(1160): This region may encompass 1-20 residues
  SITE (1161)..(1180): This region may encompass 1-20 residues
  SITE (1181)..(1200): This region may encompass 1-20 residues
  SITE (1)..(1200): This sequence may encompass 1-20 "(Gly)m(Ser)o(Gly)m" repeating units, wherein m = 1 to 20, o = 1 to 20
  See specification as filed for detailed description of substitutions and preferred embodiments
GGGGGGGGGGGGGGGGGGGGSSSSSSSSSSSSSSSSSSSSGGGGGGGGGGGGGGGGGGGGGGGGGGGGGGGGGGGGGGGGSSSSSSSSSSSSSSSSSSSSGGGGGGGGGGGGGGGGGGGGGGGGGGGGGGGGGGGGGGGGSSSSSSSSSSSSSSSSSSSSGGGGGGGGGGGGGGGGGGGGGGGGGGGGGGGGGGGGGGGGSSSSSSSSSSSSSSSSSSSSGGGGGGGGGGGGGGGGGGGGGGGGGGGGGGGGGGGGGGGGSSSSSSSSSSSSSSSSSSSSGGGGGGGGGGGGGGGGGGGGGGGGGGGGGGGGGGGGGGGGSSSSSSSSSSSSSSSSSSSSGGGGGGGGGGGGGGGGGGGGGGGGGGGGGGGGGGGGGGGGSSSSSSSSSSSSSSSSSSSSGGGGGGGGGGGGGGGGGGGGGGGGGGGGGGGGGGGGGGGGSSSSSSSSSSSSSSSSSSSSGGGGGGGGGGGGGGGGGGGGGGGGGGGGGGGGGGGGGGGGSSSSSSSSSSSSSSSSSSSSGGGGGGGGGGGGGGGGGGGGGGGGGGGGGGGGGGGGGGGGSSSSSSSSSSSSSSSSSSSSGGGGGGGGGGGGGGGGGGGGGGGGGGGGGGGGGGGGGGGGSSSSSSSSSSSSSSSSSSSSGGGGGGGGGGGGGGGGGGGGGGGGGGGGGGGGGGGGGGGGSSSSSSSSSSSSSSSSSSSSGGGGGGGGGGGGGGGGGGGGGGGGGGGGGGGGGGGGGGGGSSSSSSSSSSSSSSSSSSSSGGGGGGGGGGGGGGGGGGGGGGGGGGGGGGGGGGGGGGGGSSSSSSSSSSSSSSSSSSSSGGGGGGGGGGGGGGGGGGGGGGGGGGGGGGGGGGGGGGGGSSSSSSSSSSSSSSSSSSSSGGGGGGGGGGGGGGGGGGGGGGGGGGGGGGGGGGGGGGGGSSSSSSSSSSSSSSSSSSSSGGGGGGGGGGGGGGGGGGGGGGGGGGGGGGGGGGGGGGGGSSSSSSSSSSSSSSSSSSSSGGGGGGGGGGGGGGGGGGGGGGGGGGGGGGGGGGGGGGGGSSSSSSSSSSSSSSSSSSSSGGGGGGGGGGGGGGGGGGGGGGGGGGGGGGGGGGGGGGGGSSSSSSSSSSSSSSSSSSSSGGGGGGGGGGGGGGGGGGGGGGGGGGGGGGGGGGGGGGGGSSSSSSSSSSSSSSSSSSSSGGGGGGGGGGGGGGGGGGGG

SEQ ID NO: 801 - protein, 2000 aa, Artificial Sequence
  Description of Artificial Sequence: Synthetic polypeptide
  SITE (1)..(20): This region may encompass 1-20 residues
  SITE (21)..(40): This region may encompass 1-20 residues
  SITE (41)..(60): This region may encompass 1-20 residues
  SITE (61)..(80): This region may encompass 1-20 residues
  SITE (81)..(100): This region may encompass 1-20 residues
  SITE (101)..(120): This region may encompass 1-20 residues
  SITE (121)..(140): This region may encompass 1-20 residues
  SITE (141)..(160): This region may encompass 1-20 residues
  SITE (161)..(180): This region may encompass 1-20 residues
  SITE (181)..(200): This region may encompass 1-20 residues
  SITE (201)..(220): This region may encompass 1-20 residues
  SITE (221)..(240): This region may encompass 1-20 residues
  SITE (241)..(260): This region may encompass 1-20 residues
  SITE (261)..(280): This region may encompass 1-20 residues
  SITE (281)..(300): This region may encompass 1-20 residues
  SITE (301)..(320): This region may encompass 1-20 residues
  SITE (321)..(340): This region may encompass 1-20 residues
  SITE (341)..(360): This region may encompass 1-20 residues
  SITE (361)..(380): This region may encompass 1-20 residues
  SITE (381)..(400): This region may encompass 1-20 residues
  SITE (401)..(420): This region may encompass 1-20 residues
  SITE (421)..(440): This region may encompass 1-20 residues
  SITE (441)..(460): This region may encompass 1-20 residues
  SITE (461)..(480): This region may encompass 1-20 residues
  SITE (481)..(500): This region may encompass 1-20 residues
  SITE (501)..(520): This region may encompass 1-20 residues
  SITE (521)..(540): This region may encompass 1-20 residues
  SITE (541)..(560): This region may encompass 1-20 residues
  SITE (561)..(580): This region may encompass 1-20 residues
  SITE (581)..(600): This region may encompass 1-20 residues
  SITE (601)..(620): This region may encompass 1-20 residues
  SITE (621)..(640): This region may encompass 1-20 residues
  SITE (641)..(660): This region may encompass 1-20 residues
  SITE (661)..(680): This region may encompass 1-20 residues
  SITE (681)..(700): This region may encompass 1-20 residues
  SITE (701)..(720): This region may encompass 1-20 residues
  SITE (721)..(740): This region may encompass 1-20 residues
  SITE (741)..(760): This region may encompass 1-20 residues
  SITE (761)..(780): This region may encompass 1-20 residues
  SITE (781)..(800): This region may encompass 1-20 residues
  SITE (801)..(820): This region may encompass 1-20 residues
  SITE (821)..(840): This region may encompass 1-20 residues
  SITE (841)..(860): This region may encompass 1-20 residues
  SITE (861)..(880): This region may encompass 1-20 residues
  SITE (881)..(900): This region may encompass 1-20 residues
  SITE (901)..(920): This region may encompass 1-20 residues
  SITE (921)..(940): This region may encompass 1-20 residues
  SITE (941)..(960): This region may encompass 1-20 residues
  SITE (961)..(980): This region may encompass 1-20 residues
  SITE (981)..(1000): This region may encompass 1-20 residues
  SITE (1001)..(1020): This region may encompass 1-20 residues
  SITE (1021)..(1040): This region may encompass 1-20 residues
  SITE (1041)..(1060): This region may encompass 1-20 residues
  SITE (1061)..(1080): This region may encompass 1-20 residues
  SITE (1081)..(1100): This region may encompass 1-20 residues
  SITE (1101)..(1120): This region may encompass 1-20 residues
  SITE (1121)..(1140): This region may encompass 1-20 residues
  SITE (1141)..(1160): This region may encompass 1-20 residues
  SITE (1161)..(1180): This region may encompass 1-20 residues
  SITE (1181)..(1200): This region may encompass 1-20 residues
  SITE (1201)..(1220): This region may encompass 1-20 residues
  SITE (1221)..(1240): This region may encompass 1-20 residues
  SITE (1241)..(1260): This region may encompass 1-20 residues
  SITE (1261)..(1280): This region may encompass 1-20 residues
  SITE (1281)..(1300): This region may encompass 1-20 residues
  SITE (1301)..(1320): This region may encompass 1-20 residues
  SITE (1321)..(1340): This region may encompass 1-20 residues
  SITE (1341)..(1360): This region may encompass 1-20 residues
  SITE (1361)..(1380): This region may encompass 1-20 residues
  SITE (1381)..(1400): This region may encompass 1-20 residues
  SITE (1401)..(1420): This region may encompass 1-20 residues
  SITE (1421)..(1440): This region may encompass 1-20 residues
  SITE (1441)..(1460): This region may encompass 1-20 residues
  SITE (1461)..(1480): This region may encompass 1-20 residues
  SITE (1481)..(1500): This region may encompass 1-20 residues
  SITE (1501)..(1520): This region may encompass 1-20 residues
  SITE (1521)..(1540): This region may encompass 1-20 residues
  SITE (1541)..(1560): This region may encompass 1-20 residues
  SITE (1561)..(1580): This region may encompass 1-20 residues
  SITE (1581)..(1600): This region may encompass 1-20 residues
  SITE (1601)..(1620): This region may encompass 1-20 residues
  SITE (1621)..(1640): This region may encompass 1-20 residues
  SITE (1641)..(1660): This region may encompass 1-20 residues
  SITE (1661)..(1680): This region may encompass 1-20 residues
  SITE (1681)..(1700): This region may encompass 1-20 residues
  SITE (1701)..(1720): This region may encompass 1-20 residues
  SITE (1721)..(1740): This region may encompass 1-20 residues
  SITE (1741)..(1760): This region may encompass 1-20 residues
  SITE (1761)..(1780): This region may encompass 1-20 residues
  SITE (1781)..(1800): This region may encompass 1-20 residues
  SITE (1801)..(1820): This region may encompass 1-20 residues
  SITE (1821)..(1840): This region may encompass 1-20 residues
  SITE (1841)..(1860): This region may encompass 1-20 residues
  SITE (1861)..(1880): This region may encompass 1-20 residues
  SITE (1881)..(1900): This region may encompass 1-20 residues
  SITE (1901)..(1920): This region may encompass 1-20 residues
  SITE (1921)..(1940): This region may encompass 1-20 residues
  SITE (1941)..(1960): This region may encompass 1-20 residues
  SITE (1961)..(1980): This region may encompass 1-20 residues
  SITE (1981)..(2000): This region may encompass 1-20 residues
  SITE (1)..(2000): This sequence may encompass 1-20 "(Gly)m(Ser)o(Gly)m(Ser)o(Gly)m" repeating units, wherein m = 1 to 20, o = 1 to 20
  See specification as filed for detailed description of substitutions and preferred embodiments
GGGGGGGGGGGGGGGGGGGGSSSSSSSSSSSSSSSSSSSSGGGGGGGGGGGGGGGGGGGGSSSSSSSSSSSSSSSSSSSSGGGGGGGGGGGGGGGGGGGGGGGGGGGGGGGGGGGGGGGGSSSSSSSSSSSSSSSSSSSSGGGGGGGGGGGGGGGGGGGGSSSSSSSSSSSSSSSSSSSSGGGGGGGGGGGGGGGGGGGGGGGGGGGGGGGGGGGGGGGGSSSSSSSSSSSSSSSSSSSSGGGGGGGGGGGGGGGGGGGGSSSSSSSSSSSSSSSSSSSSGGGGGGGGGGGGGGGGGGGGGGGGGGGGGGGGGGGGGGGGSSSSSSSSSSSSSSSSSSSSGGGGGGGGGGGGGGGGGGGGSSSSSSSSSSSSSSSSSSSSGGGGGGGGGGGGGGGGGGGGGGGGGGGGGGGGGGGGGGGGSSSSSSSSSSSSSSSSSSSSGGGGGGGGGGGGGGGGGGGGSSSSSSSSSSSSSSSSSSSSGGGGGGGGGGGGGGGGGGGGGGGGGGGGGGGGGGGGGGGGSSSSSSSSSSSSSSSSSSSSGGGGGGGGGGGGGGGGGGGGSSSSSSSSSSSSSSSSSSSSGGGGGGGGGGGGGGGGGGGGGGGGGGGGGGGGGGGGGGGGSSSSSSSSSSSSSSSSSSSSGGGGGGGGGGGGGGGGGGGGSSSSSSSSSSSSSSSSSSSSGGGGGGGGGGGGGGGGGGGGGGGGGGGGGGGGGGGGGGGGSSSSSSSSSSSSSSSSSSSSGGGGGGGGGGGGGGGGGGGGSSSSSSSSSSSSSSSSSSSSGGGGGGGGGGGGGGGGGGGGGGGGGGGGGGGGGGGGGGGGSSSSSSSSSSSSSSSSSSSSGGGGGGGGGGGGGGGGGGGGSSSSSSSSSSSSSSSSSSSSGGGGGGGGGGGGGGGGGGGGGGGGGGGGGGGGGGGGGGGGSSSSSSSSSSSSSSSSSSSSGGGGGGGGGGGGGGGGGGGGSSSSSSSSSSSSSSSSSSSSGGGGGGGGGGGGGGGGGGGGGGGGGGGGGGGGGGGGGGGGSSSSSSSSSSSSSSSSSSSSGGGGGGGGGGGGGGGGGGGGSSSSSSSSSSSSSSSSSSSSGGGGGGGGGGGGGGGGGGGGGGGGGGGGGGGGGGGGGGGGSSSSSSSSSSSSSSSSSSSSGGGGGGGGGGGGGGGGGGGGSSSSSSSSSSSSSSSSSSSSGGGGGGGGGGGGGGGGGGGGGGGGGGGGGGGGGGGGGGGGSSSSSSSSSSSSSSSSSSSSGGGGGGGGGGGGGGGGGGGGSSSSSSSSSSSSSSSSSSSSGGGGGGGGGGGGGGGGGGGGGGGGGGGGGGGGGGGGGGGGSSSSSSSSSSSSSSSSSSSSGGGGGGGGGGGGGGGGGGGGSSSSSSSSSSSSSSSSSSSSGGGGGGGGGGGGGGGGGGGGGGGGGGGGGGGGGGGGGGGGSSSSSSSSSSSSSSSSSSSSGGGGGGGGGGGGGGGGGGGGSSSSSSSSSSSSSSSSSSSSGGGGGGGGGGGGGGGGGGGGGGGGGGGGGGGGGGGGGGGGSSSSSSSSSSSSSSSSSSSSGGGGGGGGGGGGGGGGGGGGSSSSSSSSSSSSSSSSSSSSGGGGGGGGGGGGGGGGGGGGGGGGGGGGGGGGGGGGGGGGSSSSSSSSSSSSSSSSSSSSGGGGGGGGGGGGGGGGGGGGSSSSSSSSSSSSSSSSSSSSGGGGGGGGGGGGGGGGGGGGGGGGGGGGGGGGGGGGGGGGSSSSSSSSSSSSSSSSSSSSGGGGGGGGGGGGGGGGGGGGSSSSSSSSSSSSSSSSSSSSGGGGGGGGGGGGGGGGGGGGGGGGGGGGGGGGGGGGGGGGSSSSSSSSSSSSSSSSSSSSGGGGGGGGGGGGGGGGGGGGSSSSSSSSSSSSSSSSSSSSGGGGGGGGGGGGGGGGGGGGGGGGGGGGGGGGGGGGGGGGSSSSSSSSSSSSSSSSSSSSGGGGGGGGGGGGGGGGGGGGSSSSSSSSSSSSSSSSSSSSGGGGGGGGGGGGGGGGGGGG

SEQ ID NO: 802 - protein, 480 aa, Artificial Sequence
  Description of Artificial Sequence: Synthetic polypeptide
  SITE (5)..(24): This region may encompass 1-20 residues
  SITE (29)..(48): This region may encompass 1-20 residues
  SITE (53)..(72): This region may encompass 1-20 residues
  SITE (77)..(96): This region may encompass 1-20 residues
  SITE (101)..(120): This region may encompass 1-20 residues
  SITE (125)..(144): This region may encompass 1-20 residues
  SITE (149)..(168): This region may encompass 1-20 residues
  SITE (173)..(192): This region may encompass 1-20 residues
  SITE (197)..(216): This region may encompass 1-20 residues
  SITE (221)..(240): This region may encompass 1-20 residues
  SITE (245)..(264): This region may encompass 1-20 residues
  SITE (269)..(288): This region may encompass 1-20 residues
  SITE (293)..(312): This region may encompass 1-20 residues
  SITE (317)..(336): This region may encompass 1-20 residues
  SITE (341)..(360): This region may encompass 1-20 residues
  SITE (365)..(384): This region may encompass 1-20 residues
  SITE (389)..(408): This region may encompass 1-20 residues
  SITE (413)..(432): This region may encompass 1-20 residues
  SITE (437)..(456): This region may encompass 1-20 residues
  SITE (461)..(480): This region may encompass 1-20 residues
  SITE (1)..(480): This sequence may encompass 1-20 "(Gly)(Ser)(Gly)(Gly)(Ser)m" repeating units, wherein m = 1 to 20
  See specification as filed for detailed description of substitutions and preferred embodiments
GSGGSSSSSSSSSSSSSSSSSSSSGSGGSSSSSSSSSSSSSSSSSSSSGSGGSSSSSSSSSSSSSSSSSSSSGSGGSSSSSSSSSSSSSSSSSSSSGSGGSSSSSSSSSSSSSSSSSSSSGSGGSSSSSSSSSSSSSSSSSSSSGSGGSSSSSSSSSSSSSSSSSSSSGSGGSSSSSSSSSSSSSSSSSSSSGSGGSSSSSSSSSSSSSSSSSSSSGSGGSSSSSSSSSSSSSSSSSSSSGSGGSSSSSSSSSSSSSSSSSSSSGSGGSSSSSSSSSSSSSSSSSSSSGSGGSSSSSSSSSSSSSSSSSSSSGSGGSSSSSSSSSSSSSSSSSSSSGSGGSSSSSSSSSSSSSSSSSSSSGSGGSSSSSSSSSSSSSSSSSSSSGSGGSSSSSSSSSSSSSSSSSSSSGSGGSSSSSSSSSSSSSSSSSSSSGSGGSSSSSSSSSSSSSSSSSSSSGSGGSSSSSSSSSSSSSSSSSSSS

SEQ ID NO: 803 - protein, 480 aa, Artificial Sequence
  Description of Artificial Sequence: Synthetic polypeptide
  SITE (4)..(23): This region may encompass 1-20 residues
  SITE (28)..(47): This region may encompass 1-20 residues
  SITE (52)..(71): This region may encompass 1-20 residues
  SITE (76)..(95): This region may encompass 1-20 residues
  SITE (100)..(119): This region may encompass 1-20 residues
  SITE (124)..(143): This region may encompass 1-20 residues
  SITE (148)..(167): This region may encompass 1-20 residues
  SITE (172)..(191): This region may encompass 1-20 residues
  SITE (196)..(215): This region may encompass 1-20 residues
  SITE (220)..(239): This region may encompass 1-20 residues
  SITE (244)..(263): This region may encompass 1-20 residues
  SITE (268)..(287): This region may encompass 1-20 residues
  SITE (292)..(311): This region may encompass 1-20 residues
  SITE (316)..(335): This region may encompass 1-20 residues
  SITE (340)..(359): This region may encompass 1-20 residues
  SITE (364)..(383): This region may encompass 1-20 residues
  SITE (388)..(407): This region may encompass 1-20 residues
  SITE (412)..(431): This region may encompass 1-20 residues
  SITE (436)..(455): This region may encompass 1-20 residues
  SITE (460)..(479): This region may encompass 1-20 residues
  SITE (1)..(480): This sequence may encompass 1-20 "(Gly)(Ser)(Gly)(Ser)m(Gly)" repeating units, wherein m = 1 to 20
  See specification as filed for detailed description of substitutions and preferred embodiments
GSGSSSSSSSSSSSSSSSSSSSSGGSGSSSSSSSSSSSSSSSSSSSSGGSGSSSSSSSSSSSSSSSSSSSSGGSGSSSSSSSSSSSSSSSSSSSSGGSGSSSSSSSSSSSSSSSSSSSSGGSGSSSSSSSSSSSSSSSSSSSSGGSGSSSSSSSSSSSSSSSSSSSSGGSGSSSSSSSSSSSSSSSSSSSSGGSGSSSSSSSSSSSSSSSSSSSSGGSGSSSSSSSSSSSSSSSSSSSSGGSGSSSSSSSSSSSSSSSSSSSSGGSGSSSSSSSSSSSSSSSSSSSSGGSGSSSSSSSSSSSSSSSSSSSSGGSGSSSSSSSSSSSSSSSSSSSSGGSGSSSSSSSSSSSSSSSSSSSSGGSGSSSSSSSSSSSSSSSSSSSSGGSGSSSSSSSSSSSSSSSSSSSSGGSGSSSSSSSSSSSSSSSSSSSSGGSGSSSSSSSSSSSSSSSSSSSSGGSGSSSSSSSSSSSSSSSSSSSSG

SEQ ID NO: 804 - protein, 460 aa, Artificial Sequence
  Description of Artificial Sequence: Synthetic polypeptide
  SITE (4)..(23): This region may encompass 1-20 residues
  SITE (27)..(46): This region may encompass 1-20 residues
  SITE (50)..(69): This region may encompass 1-20 residues
  SITE (73)..(92): This region may encompass 1-20 residues
  SITE (96)..(115): This region may encompass 1-20 residues
  SITE (119)..(138): This region may encompass 1-20 residues
  SITE (142)..(161): This region may encompass 1-20 residues
  SITE (165)..(184): This region may encompass 1-20 residues
  SITE (188)..(207): This region may encompass 1-20 residues
  SITE (211)..(230): This region may encompass 1-20 residues
  SITE (234)..(253): This region may encompass 1-20 residues
  SITE (257)..(276): This region may encompass 1-20 residues
  SITE (280)..(299): This region may encompass 1-20 residues
  SITE (303)..(322): This region may encompass 1-20 residues
  SITE (326)..(345): This region may encompass 1-20 residues
  SITE (349)..(368): This region may encompass 1-20 residues
  SITE (372)..(391): This region may encompass 1-20 residues
  SITE (395)..(414): This region may encompass 1-20 residues
  SITE (418)..(437): This region may encompass 1-20 residues
  SITE (441)..(460): This region may encompass 1-20 residues
  SITE (1)..(460): This sequence may encompass 1-20 "(Gly)(Gly)(Gly)(Ser)m" repeating units, wherein m = 1 to 20
  See specification as filed for detailed description of substitutions and preferred embodiments
GGGSSSSSSSSSSSSSSSSSSSSGGGSSSSSSSSSSSSSSSSSSSSGGGSSSSSSSSSSSSSSSSSSSSGGGSSSSSSSSSSSSSSSSSSSSGGGSSSSSSSSSSSSSSSSSSSSGGGSSSSSSSSSSSSSSSSSSSSGGGSSSSSSSSSSSSSSSSSSSSGGGSSSSSSSSSSSSSSSSSSSSGGGSSSSSSSSSSSSSSSSSSSSGGGSSSSSSSSSSSSSSSSSSSSGGGSSSSSSSSSSSSSSSSSSSSGGGSSSSSSSSSSSSSSSSSSSSGGGSSSSSSSSSSSSSSSSSSSSGGGSSSSSSSSSSSSSSSSSSSSGGGSSSSSSSSSSSSSSSSSSSSGGGSSSSSSSSSSSSSSSSSSSSGGGSSSSSSSSSSSSSSSSSSSSGGGSSSSSSSSSSSSSSSSSSSSGGGSSSSSSSSSSSSSSSSSSSSGGGSSSSSSSSSSSSSSSSSSSS

SEQ ID NO: 805 - protein, 100 aa, Artificial Sequence
  Description of Artificial Sequence: Synthetic polypeptide
  SITE (1)..(100): This sequence may encompass 1-50 "Gly Ser" repeating units
GSGSGSGSGSGSGSGSGSGSGSGSGSGSGSGSGSGSGSGSGSGSGSGSGSGSGSGSGSGSGSGSGSGSGSGSGSGSGSGSGSGSGSGSGSGSGSGSGSGS

SEQ ID NO: 806 - protein, 250 aa, Artificial Sequence
  Description of Artificial Sequence: Synthetic polypeptide
  SITE (1)..(250): This sequence may encompass 1-50 "Gly Ser Gly Gly Ser" repeating units
GSGGSGSGGSGSGGSGSGGSGSGGSGSGGSGSGGSGSGGSGSGGSGSGGSGSGGSGSGGSGSGGSGSGGSGSGGSGSGGSGSGGSGSGGSGSGGSGSGGSGSGGSGSGGSGSGGSGSGGSGSGGSGSGGSGSGGSGSGGSGSGGSGSGGSGSGGSGSGGSGSGGSGSGGSGSGGSGSGGSGSGGSGSGGSGSGGSGSGGSGSGGSGSGGSGSGGSGSGGSGSGGSGSGGSGSGGSGSGGSGSGGSGSGGS

SEQ ID NO: 807 - protein, 200 aa, Artificial Sequence
  Description of Artificial Sequence: Synthetic polypeptide
  SITE (1)..(200): This sequence may encompass 1-50 "Gly Gly Gly Ser" repeating units
GGGSGGGSGGGSGGGSGGGSGGGSGGGSGGGSGGGSGGGSGGGSGGGSGGGSGGGSGGGSGGGSGGGSGGGSGGGSGGGSGGGSGGGSGGGSGGGSGGGSGGGSGGGSGGGSGGGSGGGSGGGSGGGSGGGSGGGSGGGSGGGSGGGSGGGSGGGSGGGSGGGSGGGSGGGSGGGSGGGSGGGSGGGSGGGSGGGSGGGS

SEQ ID NO: 808 - protein, 250 aa, Artificial Sequence
  Description of Artificial Sequence: Synthetic polypeptide
  SITE (1)..(250): This sequence may encompass 1-50 "Gly Gly Gly Gly Ser" repeating units
GGGGSGGGGSGGGGSGGGGSGGGGSGGGGSGGGGSGGGGSGGGGSGGGGSGGGGSGGGGSGGGGSGGGGSGGGGSGGGGSGGGGSGGGGSGGGGSGGGGSGGGGSGGGGSGGGGSGGGGSGGGGSGGGGSGGGGSGGGGSGGGGSGGGGSGGGGSGGGGSGGGGSGGGGSGGGGSGGGGSGGGGSGGGGSGGGGSGGGGSGGGGSGGGGSGGGGSGGGGSGGGGSGGGGSGGGGSGGGGSGGGGSGGGGS

SEQ ID NO: 809 - protein, 6 aa, Artificial Sequence
  Description of Artificial Sequence: Synthetic His tag
  SITE (1)..(6): This sequence may encompass 3-6 residues
HHHHHH
